(19) United States
(12) Patent Application Publication
(10) Pub. No.: US 2023/0159989 A1
(43) Pub. Date: May 25, 2023

(54) MULTIPLEXED FLUORESCENCE IN SITU HYBRIDIZATION METHOD CAPABLE OF RAPID DETECTION OF BILLIONS OF TARGETS

(71) Applicant: Kanvas Biosciences, Inc., Monmouth Junction, NJ (US)

(72) Inventors: Philip S. Burnham, Monmouth Junction, NJ (US); Hannah Bronson, Monmouth Junction, NJ (US); Matthew P. Cheng, Monmouth Junction, NJ (US); Hao Shi, Monmouth Junction, NJ (US); Prateek Sehgal, Monmouth Junction, NJ (US); Gregory T. Booth, Monmouth Junction, NJ (US); Iwijn De Vlaminck, Monmouth Junction, NJ (US)

(73) Assignee: Kanvas Biosciences, Inc., Monmouth Junction, NJ (US)

(21) Appl. No.: 18/058,171

(22) Filed: Nov. 22, 2022

Related U.S. Application Data
(60) Provisional application No. 63/339,291, filed on May 6, 2022.
(60) Provisional application No. 63/282,947, filed on Nov. 24, 2021.

(51) Int. Cl. C12Q 1/6816

(52) U.S. Cl. CPC C12Q 1/6816

(57) ABSTRACT

The present disclosure provides multiplexed methods, and constructs made to be used in said methods, for characterizing microbes from a biological sample to both rapidly identify the microbe and characterize drug susceptibility or resistance and perform microbial taxa identification and nucleic acid target detection at high multiplexity. The methods can also be used to predict future microbe drug susceptibility or resistance.

### CROSS-REFERENCE TO RELATED APPLICATIONS

[0001] This application claims the benefit of U.S. Provisional Application No. 63/282,947, filed on Nov. 24, 2021, and U.S. Provisional Application No. 63/339,291, filed on May 6, 2022. The entire contents of the aforementioned applications are incorporated herein by reference in their entireties.

### SEQUENCE LISTING

[0002] This application includes and incorporates by reference in its entirety a Sequence Listing XML in the required .xml format. The Sequence Listing XML file that has been electronically filed contains the information of the nucleotide and/or amino acid sequences disclosed in the patent application using the symbols and format in accordance with the requirements of 37 C.F.R. §§ 1.832 through 1.834.

[0003] The Sequence Listing XML filed herewith serves as the electronic copy required by § 1.834(b)(1).

[0004] The Sequence Listing XML is identified as follows: “KANVAS_003_SEQ_LIST.xml” (1649 kilo bytes in size), which was created on Nov. 22, 2022.

### TECHNICAL FIELD

[0005] This disclosure relates to methods for highly-multiplexed, rapid detection of nucleotides in samples, and constructs to be used in said methods.

### BACKGROUND

[0006] Microbes, both individually and in communities (i.e. microbiomes), play a large role in human health and disease. Conventional methods to study biologically and clinically relevant aspects of these microbes, including antimicrobial resistance, suffer from long turnaround times and are limited in the number of taxa and genetic elements they can profile. As a result, researchers are left with an incomplete understanding of microbiota in their native biological contexts. In addition, clinicians are faced with diagnostic delays that are detrimental to patient care, which increases the risk of patient morbidity and mortality.

### SUMMARY

[0007] Antimicrobial resistance is an emerging threat to global public health. Current tests available in clinical laboratories are time-consuming and limited in scope for antimicrobial resistance profile measurement. Timely and accurate information on pathogen identity and their associated antimicrobial susceptibility profile is critical in helping clinicians treat patients with shorter response time and higher precision. In addition, many other microbial phenotypes, such as persistence, tolerance, motility, hyphae formation, spore formation, and quorum sensing, can provide useful biological and clinical information, but are difficult to measure using standard sequencing techniques. The present disclosure provides methods for microbial identification and rapid antimicrobial susceptibility profile measurement or other microbial phenotype measurements. These methods combine a short period of culturing with known concentrations of antimicrobial drugs, or other alterations to the environment, with a highly multiplexed fluorescence readout to distinguish cellular taxonomic identity and susceptibility to different classes of antimicrobials or other relevant microbial phenotypes. This approach will enable a rapid and cost-effective test that can be deployed in clinical settings for fast diagnosis of infectious agents and proper selection of antimicrobial drugs for treatment.

[0008] The present disclosure provides methods that combine single-cell imaging, single-molecule imaging, microfluidic technologies, and phenotypic antimicrobial susceptibility testing to enable rapid identification of microbial species, current antimicrobial susceptibility profile, and future antimicrobial susceptibility profile, directly from patient samples. The present disclosure also provides methods that enable the detection of millions or billions of potential nucleic acid based targets in a single assay.

[0009] The present disclosure provides methods that can rapidly identify microbial species, genera, families, orders, classes, and phyla associated with a particular tissue or specimen. In further embodiments, the present disclosure provides methods to rapidly determine any antimicrobial drugs or compounds the identified microbial species is susceptible to or to which the microbial species may become susceptible in the future.

[0010] In some aspects, the present disclosure provides methods of characterizing a microbial cell from a biological sample, the method comprising a) directly inoculating the microbe onto a device; b) identifying the microbe; and c) detecting susceptibility to one or more antimicrobial agents.

[0011] In some aspects, the present disclosure provides methods of characterizing a microbial cell from a biological sample, the method comprising a) directly inoculating the microbe onto a device; b) identifying the microbe; and c) detecting future susceptibility to one or more antimicrobial agents.

[0012] In some embodiments, the sample is not subjected to culturing before the microbe is inoculated onto the device. In some embodiments, the microbe in the sample is cultured for one to 12 cell divisions before it is inoculated onto the device. In some embodiments, the microbe in the sample is cultured for one to numerous cell divisions before it is inoculated onto the device. The number of cell divisions depends on the species doubling time, which can be variable.

[0013] In some embodiments, the microbe is identified by in situ hybridization. In some embodiments, the microbe is identified by fluorescence in situ hybridization (FISH). In some embodiments, the fluorescence in situ hybridization is high-phylogenetic-resolution fluorescence in situ hybridization (HiPR-FISH).

[0014] In some embodiments, the microbe is further characterized via live-cell imaging or growth dynamics calculation while in situ hybridization is performed.

[0015] In some embodiments, the microbe is identified by hybridization of a bar-coded probe a 16S ribosomal RNA sequence in the microbe, 5S ribosomal RNA sequence in the microbe, and/or 23S ribosomal RNA sequence in the microbe. In some embodiments, the in situ hybridization is multiplexed. In some embodiments, the susceptibility to one or more microbial agents is determined by measuring the minimum inhibitory concentration of the microbe when exposed to an antimicrobial agent. In some embodiments, the susceptibility to one or more microbial agents is determined by measuring microbial cell metabolism when the microbe is exposed to an antimicrobial agent. In some embodiments, microbial cell metabolism is measured by determining the concentration of dissolved carbon dioxide, oxygen consumption of microbes in the sample, expression of genes involved in cell division and/or growth, or expression of stress response genes. In some embodiments, microbial cell susceptibility is determined by a live/dead stain. In some embodiments, wherein microbial cell susceptibility is determined by cell number. In some embodiments, microbial cell susceptibility is determined by detecting the presence or absence of one or more antimicrobial genes in the microbial cell. In some embodiments, microbial cell susceptibility is determined by detecting the presence or absence of one or more gene mutations associated with the development of antimicrobial resistance or susceptibility in the microbial cell. In some embodiments, future microbial cell susceptibility is determined by detecting the presence or absence of one or more antimicrobial genes in the microbial cell. In some embodiments, future microbial cell susceptibility is determined by detecting the presence or absence of one or more gene mutations associated with the development of antimicrobial resistance or susceptibility in the microbial cell.

[0016] In some embodiments, wherein the one or more gene mutations associated with the development of antimicrobial resistance or susceptibility is selected from deletions, duplications, single nucleotide polymorphisms (SNPs), frame-shift mutations, inversions, insertions, and/or nucleotide substitutions. In some embodiments, the one or more antimicrobial genes is selected from: genes encoding multidrug resistance proteins (e.g. PDR1, PDR3, PDR7, PDR9), ABC transporters (e.g. SNQ2, STE6, PDR5, PDR10, PDR11, YOR1), membrane associated transporters (GAS1, D4405), soluble proteins (e.g. G3PD), RNA polymerase, rpoB, gyrA, gyrB, 16S RNA, 23S rRNA, NADPH nitroreductase, sul2, strAB, tetAR, aac3-iid, aph, sph, cmy-2, floR, tetB; aadA, aac3-VIa, and sul1. In some embodiments, the presence or absence of one or more antimicrobial genes, or the gene mutation associated with the development of antimicrobial resistance or susceptibility in the microbial cell is detected using in situ hybridization. In some embodiments, the presence or absence of one or more antimicrobial genes, or the gene mutation associated with the development of antimicrobial resistance or susceptibility in the microbial cell is detected using fluorescence in situ hybridization (FISH). In some embodiments, the fluorescence in situ hybridization is high-phylogenetic-resolution fluorescence in situ hybridization (HiPR-FISH).

[0017] In some embodiments, the identification of the microbial cell and the detection of susceptibility or future susceptibility to one or more antimicrobial agents occurs sequentially.

[0018] In some embodiments, the identification of the microbial cell and the detection of susceptibility or future susceptibility to one or more antimicrobial agents occurs simultaneously.

[0019] In some embodiments, the identification of the microbial cell and the detection of susceptibility or future susceptibility to one or more antimicrobial agents occurs in parallel.

[0020] In some embodiments, the biological sample is obtained from a patient. In some embodiments, the biological sample is obtained from a patient diagnosed with or believed to be suffering from an infection or disorder. In some embodiments, the disease or disorder is an infection. In some embodiments, the infection is a bacterial, viral, fungal, or parasitic infections. In some embodiments, the bacterial infection is selected from Mycobacterium, Streptococcus, Staphylococcus, Shigella, Campylobacter, Salmonella, Clostridium, Corynebacterium, Pseudomonas, Neisseria, Listeria, Vibrio, Bordetella, E. coli (including pathogenic E. coli), Pseudomonas aeruginosa, Enterobacter cloacae, Mycobacterium tuberculosis, Staphylococcus aureus, Helicobacter pylori, Legionella, Acinetobacter baumannii, Citrobacter freundii, Citrobacter koseri, Enterobacter cloacae, Enterococcus faecalis, Enterococcus faecium, Escherichia coli, Klebsiella oxytoca, Klebsiella pneumoniae, Proteus mirabilis, Proteus vulgaris, Pseudomonas aeruginosa, Serratia marcescens, Staphylococcus aureus, Staphylococcus saprophyticus, and Streptococcus agalactiae, or a combination thereof. In some embodiments, the viral infection is selected from Helicobacter pylori, infectious haematopoietic necrosis virus (IHNV), Parvovirus B19, Herpes Simplex Virus, Varicella-zoster virus, Cytomegalovirus, Epstein-Barr virus, Hepatitis A virus, Hepatitis B virus, Hepatitis C virus, Hepatitis D virus, Hepatitis E virus, Measles virus, Mumps virus, Rubella virus, Human Immunodeficiency Virus (HIV), Influenza virus, Rhinovirus, Rotavirus A, Rotavirus B, Rotavirus C, Respiratory Syncytial Virus (RSV), Varicella zoster, Poliovirus, Norovirus, Zika Virus, Dengue Virus, Rabies Virus, Newcastle Disease Virus, and White Spot Syndrome Virus, or a combination thereof. In some embodiments, the fungal infection is selected from Aspergillus, Candida, Pneumocystis, Blastomyces, Coccidioides, Cryptococcus, and Histoplasma, or a combination thereof. In some embodiments, the parasitic infection is selected from Plasmodium (i.e. P. falciparum, P. malariae, P. ovale, P. knowlesi, and P. vivax), Trypanosoma, Toxoplasma, Giardia, and Leishmania, Cryptosporidium, helminthic parasites: Trichuris spp. (whipworms), Enterobius spp. (pinworms), Ascaris spp. (roundworms), Ancylostoma spp. and Necator spp. (hookworms), Strongyloides spp. (threadworms), Dracunculus spp. (Guinea worms), Onchocerca spp. and Wuchereria spp. (filarial worms), Taenia spp., Echinococcus spp., and Diphyllobothrium spp. (human and animal cestodes), Fasciola spp. (liver flukes) and Schistosoma spp. (blood flukes), or a combination thereof.

[0021] In some embodiments, the biological sample is selected from bronchoalveolar lavage fluid (BAL), blood, serum, plasma, urine, cerebrospinal fluid, pleural fluid, synovial fluid, ocular fluid, peritoneal fluid, amniotic fluid, gastric fluid, lymph fluid, interstitial fluid, tissue homogenate, cell extracts, saliva, sputum, stool, physiological secretions, tears, mucus, sweat, milk, semen, seminal fluid, vaginal secretions, fluid from ulcers and other surface eruptions, blisters, and abscesses, and extracts of tissues including biopsies of normal, malignant, and suspect tissues or any other constituents of the body which may contain the microorganism of interest. In some embodiments, the biological sample is a human oral microbiome sample. In some embodiments, the biological sample is a whole organism.

[0022] In another aspect, a method for analyzing a sample can include:
[0023] contacting at least one encoding probe with the sample to produce a first complex, wherein each encoding probe comprises a targeting sequence, a first landing pad sequence, and a second landing pad sequence;
[0024] adding at least one first emissive readout probe to the first complex, wherein the first emissive readout probe comprises a label and a sequence complementary to the first landing pad sequence;
[0025] acquiring one or more emission spectra from the first emissive readout probe;
[0026] adding an exchange probe to the sample, wherein the exchange probe comprises a 100% complementary sequence to the first emissive readout probe sequence,
[0027] hybridizing the exchange probe to the first emissive readout probe to form a second complex;
[0028] removing the second complex from the sample,
[0029] adding at least one second emissive readout probe to the first complex, wherein the second emissive readout probe comprises a label and a sequence complementary to the second landing pad sequence;
[0030] acquiring one or more emission spectra from the second emissive readout probe;
[0031] repeating the aforementioned steps for at least one different encoding probe;
[0032] determining the spectra of “signal” (e.g., puncta, blobs) and assigning them to a species of interest; and
[0033] decoding the spectra into a single, targeted transcript through means of signal deconvolution, error correction, comparison to reference standards.

[0034] In certain embodiments, the first emissive readout probe sequence can be the same length as the first landing pad sequence.

[0035] In certain embodiments, the first emissive readout probe sequence can be at least 2 nucleotides longer than the first landing pad sequence.

[0036] In certain embodiments, the second emissive readout probe sequence can be the same length as the second landing pad sequence.

[0037] In certain embodiments, the second emissive readout probe sequence can be at least 2 nucleotides longer than the second landing pad sequence.

[0038] In another aspect, a method for analyzing a sample can include:
[0039] generating a set of probes, wherein each probe comprises:
[0040] (i) a targeting sequence;
[0041] (ii) a first landing pad sequence; and
[0042] (iii) a second landing pad sequence;
[0043] contacting the set of probes with the sample to permit hybridization of the probes to nucleotides present in the sample to produce a complex;
[0044] adding a first set of emissive readout probes to the complex, wherein each emissive readout probe comprises:
[0045] (i) a label, and
[0046] (ii) a sequence complementary to the first or second landing pad sequence;
[0047] acquiring one or more emission spectra from the first emissive readout probe;
[0048] adding a set of exchange probes to the sample, wherein each exchange probe comprises a 100% complementary sequence to the first emissive readout probe sequences,
[0049] hybridizing the exchange probes to the first emissive readout probes to form a second complex;
[0050] removing the second complex from the sample, adding a second set of emissive readout probes to the complex, wherein each emissive readout probe comprises:
[0051] (i) a label, and
[0052] (ii) a sequence complementary to the first or second landing pad sequence;
[0053] acquiring one or more emission spectra from the second emissive readout probe;
[0054] determining the spectra of “signal” (e.g., puncta, blobs) and assigning them to a species of interest; and
[0055] decoding the spectra into a single, targeted transcript through means of signal deconvolution, error correction, comparison to reference standards.

[0056] In certain embodiments, the emissive readout probe sequence can be the same length as the first or second landing pad sequence.

[0057] In certain embodiments, the emissive readout probe sequence can be at least 2 nucleotides longer than the first or second landing pad sequence.

[0058] In another aspect, a construct can include:
[0059] a targeting sequence that is a region of interest on a nucleotide;
[0060] a first landing pad sequence;
[0061] a second landing pad sequence, wherein the second landing pad sequence is different from the first landing pad sequence;
[0062] a first emissive readout probe comprising a first label and a sequence complimentary to the first landing pad sequence;
[0063] an exchange probe comprising a 100% complementary sequence to the first emissive readout probe sequences; and
[0064] a second emissive readout probe comprising a second label and a sequence complimentary to the second landing pad sequence.

[0065] In certain embodiments, the first emissive readout probe sequence can be the same length as the first landing pad sequence.

[0066] In certain embodiments, the first emissive readout probe sequence can be at least 2 nucleotides longer than the first landing pad sequence.

[0067] In certain embodiments, the second emissive readout probe sequence can be the same length as the second landing pad sequence.

[0068] In certain embodiments, the second emissive readout probe sequence can be at least 2 nucleotides longer than the second landing pad sequence.

[0069] In another aspect, a library of constructs comprising a plurality of barcoded probes, wherein each barcoded probe comprises:
[0070] a targeting sequence that is a region of interest on a nucleotide;
[0071] a first landing pad sequence;
[0072] a second landing pad sequence, wherein the second landing pad sequence is different from the first landing pad sequence;
[0073] a first emissive readout probe comprising a first label and a sequence complimentary to the first landing pad sequence;
[0074] an exchange probe comprising a 100% complementary sequence to the first emissive readout probe sequences; and
[0075] a second emissive readout probe comprising a second label and a sequence complimentary to the second landing pad sequence.

[0076] In certain embodiments, the first emissive readout probe sequence can be the same length as the first landing pad sequence.

[0077] In certain embodiments, the first emissive readout probe sequence can be at least 2 nucleotides longer than the first landing pad sequence.

[0078] In certain embodiments, the second emissive readout probe sequence can be the same length as the second landing pad sequence.

[0079] In certain embodiments, the second emissive readout probe sequence can be at least 2 nucleotides longer than the second landing pad sequence.

[0080] In another aspect, a method for analyzing a bacterial sample can include:
[0081] contacting at least one encoding probe with the sample to produce a first complex, wherein each encoding probe comprises a targeting sequence, a first landing pad sequence, and a second landing pad sequence;
[0082] adding at least one first emissive readout probe to the first complex, wherein the first emissive readout probe comprises a label and a sequence complementary to the first landing pad sequence;
[0083] detecting the first emissive readout probe with a confocal microscope;
[0084] adding an exchange probe to the sample, wherein the exchange probe comprises a 100% complementary sequence to the first emissive readout probe sequence,
[0085] hybridizing the exchange probe to the first emissive readout probe to form a second complex;
[0086] removing the second complex from the sample,
[0087] adding at least one second emissive readout probe to the first complex, wherein the second emissive readout probe comprises a label and a sequence complementary to the second landing pad sequence;
[0088] detecting the second emissive readout probe with a confocal microscope;
[0089] repeating the aforementioned steps for at least one different encoding probe;
[0090] determining the spectra of “signal” (e.g., puncta, blobs) and assigning them to a bacterium; and
[0091] decoding the spectra into a single, targeted transcript through means of signal deconvolution, error correction, comparison to reference standards.

[0092] In certain embodiments, the first emissive readout probe sequence can be the same length as the first landing pad sequence.

[0093] In certain embodiments, the first emissive readout probe sequence can be at least 2 nucleotides longer than the first landing pad sequence.

[0094] In certain embodiments, the second emissive readout probe sequence can be the same length as the second landing pad sequence.

[0095] In certain embodiments, the second emissive readout probe sequence can be at least 2 nucleotides longer than the second landing pad sequence.

[0096] In another aspect, a method for analyzing a bacterial sample can include:
[0097] generating a set of probes, wherein each probe comprises:
[0098] (i) a targeting sequence;
[0099] (ii) a first landing pad sequence; and
[0100] (iii) a second landing pad sequence;
[0101] contacting the set of probes with the sample to permit hybridization of the probes to nucleotides present in the sample to produce a complex;
[0102] adding a first set of emissive readout probes to the complex, wherein each emissive readout probe comprises:
[0103] (i) a label, and
[0104] (ii) a sequence complementary to the first or second landing pad sequence;
[0105] detecting the first set of emissive readout probes in the sample with a confocal microscope;
[0106] adding a set of exchange probes to the sample, wherein each exchange probe comprises a 100% complementary sequence to the first emissive readout probe sequences,
[0107] hybridizing the exchange probes to the first emissive readout probes to form a second complex;
[0108] removing the second complex from the sample,
[0109] adding a second set of emissive readout probes to the complex, wherein each emissive readout probe comprises:
[0110] (i) a label, and
[0111] (ii) a sequence complementary to the first or second landing pad sequence;
[0112] detecting the second set of emissive readout probes in the sample with a confocal microscope;
[0113] determining the spectra of “signal” (e.g., puncta, blobs) and assigning them to a bacterium; and
[0114] decoding the spectra into a single, targeted transcript through means of signal deconvolution, error correction, comparison to reference standards.

[0115] In certain embodiments, the emissive readout probe sequence can be the same length as the first or second landing pad sequence.

[0116] In certain embodiments, the emissive readout probe sequence can be at least 2 nucleotides longer than the first or second landing pad sequence.

[0117] Other aspects, embodiments, and features will be apparent from the following description, the drawings, and the claims.

### BRIEF DESCRIPTION OF THE FIGURES

[0118] FIGS. 1A-1B shows an exemplary method of rapid phenotypic profiling of antibiotic resistance followed by microbial identification using imaging. FIG. 1A shows an experimental set-up. FIG. 1B shows an example of a binary barcoding and spectral imaging approach for highly multiplexed labeling of microbes for taxonomic identification.

[0119] FIG. 2 shows an experimental work-flow for HiPR-FISH to identify a microbe in a sample and characterize a drug-resistance phenotype.

[0120] FIG. 3 shows E. coli detected in urine samples obtained from three different patients. HiPR-FISH was performed directly on three patient samples, each with over 100,000 CFU/mL of E. coli. The images were collected from the first emission channel after excitation of a 561 nm laser (in agreement with dye corresponding to the readout probe used, Alexa546).

[0121] FIG. 4 shows a HiPR-FISH panel identifying species including A. baumannii, C. freundii, S. saprophyticus, and a mixture of A. baumannii and C. freundii. Maximum merged emission images from different laser excitation wavelengths (first three columns). The fourth column is a false-colored, merged image of 405 nm (blue), 488 nm (green), and 561 nm (red). The fifth column is a close-up of the white boxes in column 4.

[0122] FIG. 5 shows the ability of HiPR-FISH to report drug susceptibility and minimum inhibitory concentration (MIC), and determine antimicrobial resistance or susceptibility. A comparison of the first and last time points, after several hours growth on a HiPR-FISH chip, for several concentrations of meropenem for carbapenem-resistant and carbapenem-susceptible K. pneumonia. The carbapenem-resistant K. pneumoniae grows beyond 2 μg/mL (* denotes MIC) in agreement with Clinical and Laboratory Standards Institute criteria.

[0123] FIG. 6 shows the ability of HiPR-FISH to detect fastidious and slow growing organisms in a synthetic mixture of fixed and digested Candida species. HiPR-FISH probes were designed to detect C. tropicalis (blue), C. glabrata (orange), and C. albicans (green) (colors not shown).

[0124] FIGS. 7A-7C shows gene expression measurements enable rapid detection of stress response in HiPR-FISH compatible manner. FIG. 7A shows a schematic of an ultrarapid gene expression measurement assay that can be performed in 2 hours with only 5 minutes of exposure to stress. The results of the 2 hour assay, with E. coli rRNA and heat-shock response gene clpB mRNA are shown in E. coli grown at 30° C. (FIG. 7B) and shocked at 46° C. (FIG. 7C) for 5 minutes. Scale bars=20 μm.

[0125] FIG. 8 shows a schematic of HiPR-Swap.

[0126] FIG. 9 shows probe stripping and signal recovery in HiPR-Swap. Fixed monomicrobial stock of E. coli, Klebsiella pneumoniae, and Pseudomonas aeruginosa, were hybridized with species-specific encoding probes and individual readout probes in a single step (left column of images). Exchange buffer, with exchange probes for each readout, was added and incubated overnight to remove the readout probes (middle column). Signals for each species were recovered by adding back readout probes without encoding probes (right column).

[0127] FIG. 10 shows speed of stripping readout probes in HiPR-Swap. HiPR-Swap samples of E. coli, Klebsiella pneumoniae, and Pseudomonas aeruginosa, from FIG. 9 were imaged after 5 days (column “After 5 days”). Exchange buffer, with exchange probes for each readout, was added and incubated for 1 hour to remove the readout probes (column “Strip—1 hr”).

[0128] FIG. 11 shows samples of E. coli, Klebsiella pneumoniae, and Pseudomonas aeruginosa, from FIG. 10 were imaged after stripping overnight (column “Strip—overnight”). Signals for each species were recovered by adding different readout probes of green color without encoding probes (column “Swap—R #-488”).

[0129] FIG. 12 shows probe stripping and swapping reaction in a single step. Top panel shows single step strip and swap reaction and bottom panel shows sequential strip and swap reaction. Fixed synthetic mixtures of E. coli and Pseudomonas aeruginosa (P. aeru; P. aeruginosa) were hybridized with species-specific encoding probes and Eubacterium probes (conjugated with Rhodamine Red-X fluorophore). First row of each panel shows the Eubacterium signal. In round 1, only E. coli is hybridized with its readout probes for both the single step and sequential step conditions (left column second row of each panel). In round 2 of the single step condition, exchange buffer containing exchange probes for E. coli and readout probes for P. aeruginosa was added and incubated for 2 hours (top panel middle column second row). In round 2 of the sequential step condition, exchange buffer containing exchange probes for E. coli was added and incubated for 2 hours (bottom panel middle column second row). In round 3 of the single step condition, exchange buffer containing readout probes for E. coli and exchange probes for P. aeruginosa was added and incubated for 2 hours (top panel last column second row). In round 3 of sequential step condition, exchange buffer containing readout probes for P. aeruginosa was added and incubated for 2 hours (bottom panel last column second row).

[0130] FIG. 13 shows real time measurement of single step strip and swap reaction of HiPR-Swap. Fixed synthetic mixtures of E. coli and Pseudomonas aeruginosa (P. aeru, P. aeruginosa) were hybridized with species-specific encoding probes. Before performing single step stripping and swapping reaction, only E. coli is hybridized with its readout probes (Image: “Before”). While keeping the sample under the microscope, exchange buffer containing exchange probes for E. coli and readout probes for P. aeruginosa was added and acquisition of images was started (Image: 0 min, 2 min, 4 min, 8 min, 12 min).

[0131] FIG. 14 shows an overview of Example 11. Fixed monomicrobial stocks of E. coli are plated in different wells and encoded with a unique set of 24 probes that have several readout bits (at least one on-bit per round). After encoding, the bacteria undergo: washing of encoding probes, probe exchange with the addition of readout and exchange probes, wash of readout and exchange probes, and imaging. Each round will yield a potentially non-unique 10 bit (sub-) barcode. The readouts exchanges were performed in four rounds, with the first and final round having identical readout probes used for a recovery check. After the final round a full barcode (30 bits) can be generated.

[0132] FIG. 15 shows a basic design and concept for HiPR-Swap, in situ. A unique set of 30 readout probes were designed that can be used with a standard 10-bit system described herein. To achieve this, each oligo sequence on the readout probe is unique, but each fluorophore is used three times. Readout probes with the same fluorophore must be used in different rounds to achieve accurate barcode interpretation. As an example of their use, a schematic of bacteria and the encoding scheme is shown. The bacteria is encoded with probes targeting the rRNA and with flanking landing pads (colored) that correspond to the reverse complement of the intended readout probe. In each round a set of 10 readout probes (and possibly 10 exchange probes) are added to determine a sub-barcode for the round. After each round, the readout probes are removed from the specimen and a new batch is added. After all rounds are complete, classification is performed to determine the round-barcode for each cell. The round barcodes are then concatenated to determine the full barcode.

[0133] FIGS. 16A-16B provide a summary of classification accuracy for Example 11. Barcode classification was performed for each cell in each round. Each well was encoded with a unique barcode (legend in bottom right). FIG. 16A: The accuracy was defined as the number of cells with round-barcodes exactly matching the encoding (Match=TRUE) divided by the number with any difference from encoding (Match=FALSE). For each well, in each round, over 2000 bacterial cells were classified. A single cell was misclassified in round 3 of well 1. FIG. 16B: A fourth round of exchange was performed to restore the original, round 1 barcode in each well and again performed classification. The accuracy of classification for round 1 and round 4 for each well is shown.

[0134] FIG. 17 illustrates that bacteria fluorescence matches expected barcode. In each well a mask for the most abundant barcode applied to the maximum spectral projection. Fluorescent bacteria only appear in channels corresponding to the “1” bit.

[0135] FIG. 18 shows a field of view in tissue for three different rounds of HiPR-Swap to detect microbial taxa at the phylum level. For each round, the colors corresponding to the phyla present in the round are shown. Large speckled blue (color not shown) objects at the bottom of each image are DAPI-stained nuclei in the host epithelium. Insets with bacteria are shown in white boxes. Outline phylum names indicate low abundance taxa.

[0136] FIG. 19 shows a field of view in tissue for three different rounds of HiPR-Swap to detect microbial taxa at the species level. For each round, individual species were encoded with a single bit. Large speckled blue objects at the top right of each image are DAPI-stained nuclei in the host epithelium. Color change between images indicates signal exchange from the HiPR-Swap assay.

### DETAILED DESCRIPTION

[0137] It is to be appreciated that certain aspects, modes, embodiments, variations, and features of the present methods and compositions are described below in various levels of detail in order to provide a substantial understanding of the present disclosure.

### Definitions

[0138] Where values are described as ranges, endpoints are included. Furthermore, it will be understood that such disclosure includes the disclosure of all possible sub-ranges within such ranges, as well as specific numerical values that fall within such ranges irrespective of whether a specific numerical value or specific sub-range is expressly stated.

[0139] “5′-end” and “3′-end” refers to the directionality, e.g., the end-to-end orientation of a nucleotide polymer (e.g., DNA). The 5′-end of a polynucleotide is the end of the polynucleotide that has the fifth carbon.

[0140] The term “about,” as used herein, refers to +/−10% of a recited value.

[0141] “Complementary” refers to the topological compatibility or matching together of interacting surfaces of two nucleotides as understood by those of skill in the art. Thus, two sequences are “complementary” to one another if they are capable of hybridizing to one another to form a stable anti-parallel, double-stranded nucleic acid structure. A first nucleotide is complementary to a second nucleotide if the nucleotide sequence of the first nucleotide is substantially identical to the nucleotide sequence of the nucleotide binding partner of the second nucleotide, or if the first nucleotide can hybridize to the second nucleotide under stringent hybridization conditions. Thus, the nucleotide whose sequence is 5′-TATAC-3′ is complementary to a nucleotide whose sequence is 5′-GTATA-3′.

[0142] “Nucleotides,” “Nucleic acids,” “polynucleotide” or “oligonucleotide” refer to a polymeric-form of DNA and/or RNA (e.g., ribonucleotides, deoxyribonucleotides, or analogs thereof) of any length; e.g., a sequence of two or more ribonucleotides or deoxyribonucleotides. As used herein, the term “nucleotides” includes double- and single-stranded DNA, as well as double- and single-stranded RNA; it also includes modified and unmodified forms of a nucleotide (modifications to and of a nucleotide, for example, can include methylation, phosphorylation, and/or capping). In some embodiments, a nucleotide can be one of the following: a gene or gene fragment; genomic DNA; genomic DNA fragment; exon; intron; messenger RNA (mRNA); transfer RNA (tRNA); ribosomal RNA (rRNA); ribozyme; cDNA; recombinant nucleotide; branched nucleotide; plasmid; vector; isolated DNA of any sequence; isolated RNA of any sequence; any DNA described herein, any RNA described herein, primer or amplified copy of any of the foregoing.

[0143] In some embodiments, nucleotides can have any three-dimensional structure and may perform any function, known or unknown. The structure of nucleotides can also be referenced to by their 5′- or 3′-end or terminus, which indicates the directionality of the nucleotide sequence. Adjacent nucleotides in a single-strand of nucleotides are typically joined by a phosphodiester bond between their 3′ and 5′ carbons. However, different internucleotide linkages could also be used, such as linkages that include a methylene, phosphoramidate linkages, etc. This means that the respective 5′ and 3′ carbons can be exposed at either end of the nucleotide sequence, which may be called the 5′ and 3′ ends or termini. The 5′ and 3′ ends can also be called the phosphoryl (PO₄) and hydroxyl (OH) ends, respectively, because of the chemical groups attached to those ends. The term “nucleotides” also refers to both double- and single-stranded molecules.

[0144] In some embodiments, nucleotides can include modified nucleotides, such as methylated nucleotides and nucleotide analogs (including nucleotides with non-natural bases, nucleotides with modified natural bases such as aza- or deaza-purines, etc.). If present, modifications to the nucleotide structure can be imparted before or after assembly of the nucleotide sequence.

[0145] In some embodiments, the sequence of nucleotides can be interrupted by non-nucleotide components. One or more ends of the nucleotides can be protected or otherwise modified to prevent that end from interacting in a particular way (e.g. forming a covalent bond) with other nucleotides.

[0146] In some embodiments, nucleotides can be composed of a specific sequence of four nucleotide bases: adenine (A); cytosine (C); guanine (G); and thymine (T). Uracil (U) can also be present, for example, as a natural replacement for thymine when the nucleotide is RNA. Uracil can also be used in DNA. Thus, the term “sequence” refers to the alphabetical representation of nucleotides or any nucleic acid molecule, including natural and non-natural bases.

[0147] When used in terms of length, for example 20 nt, “nt” refers to nucleotides.

[0148] As used herein a “taxon” refers to a group of one or more populations of an organism or organisms. In some embodiments, a “taxon” refers to a phylum, a class, an order, a family, a genus, a species, or a train. In some embodiments, the disclosure includes providing a list of taxa of microorganisms. In some embodiments, the list of taxa of microorganisms is selected from a list of phyla, a list of classes, a list of orders, a list of families, a list of genera, or a list of species, of microorganisms.

[0149] In analysis of a sample, a species can be a target of interest. For example, a species can include a taxonomic species.

[0150] In the event of any term having an inconsistent definition between this application and a referenced document, the term is to be interpreted as defined herein.

[0151] The development of antimicrobial resistance among infectious organisms is an emerging problem in patient treatment. Some microbial organisms have even become resistant to multiple classes of antimicrobials, leading to increasing incidences of potentially fatal infections that cannot be treated with available antimicrobials. In some cases, microbes possessing more than one antimicrobial gene may only begin expressing one or more of these genes after exposure to antimicrobials. Currently, microbiology laboratories in hospitals and clinics rely on culturing bacteria from patient samples before species identification or antimicrobial susceptibility testing, however culturing bacteria is time-consuming and labor-intensive. Furthermore, many microorganisms are not readily culturable.

[0152] In a typical clinical lab workflow, the culturing step involves plating patient samples on an agar substrate and waiting for individual bacterium to grow into macroscopic colonies, each containing 10 to 100 million cells. Depending on the species of bacteria, this process can take between 24 hours to several days, which leads to a significant time delay from sampling to diagnosis. In addition, culturing bacteria requires a technician to prepare the culture plates by hand and evaluate bacterial growth by eye. Both of these factors add unnecessary hands-on time for the technician, and further increase the amount of time required for diagnosis. In certain classes of diseases such as sepsis, a delayed diagnosis can mean life or death for the patient.

[0153] The key innovative step of this method is to implement parallel single-cell imaging for microbial identification and characterization, which identification of microbial genera and species, and assessment of growth under different antimicrobial conditions directly on individual microbial cells or small colonies of cells, without the need to wait for cells to grow and divide into colonies containing millions to billions of cells.

[0154] Cell division events or microbial morphology changes can be monitored via iterative imaging of the sample during culture, or at the conclusion of culturing and following fixation, to measure microbial growth and stress in a solution with a given concentration of antimicrobials. Because the observation of only a few cell division events is sufficient to assess susceptibility or resistance of the microbial species to an antimicrobial agent, this technique can provide definitive results in less time than a complete cell cycle. This process is orders of magnitude faster than current techniques. For example, in a population of 1000 asynchronously dividing cells, the mean waiting time for the next division event to occur is 1/1000 of the duration of the typical cell cycle. For example, if the bacteria is E. coli, with an average cell division time of 20 minutes, the next event occurs after roughly one second. The parallel observation of many (thousands and more) cells also enables the construction of division time distribution for accurate determination of growth rate over a time duration of one or few cell cycles. In some embodiments, the cells may be allowed to grow for a defined period of time. After the growth period, the samples can be fixed and observed on a microscope. In some cases, growth is measured by counting the number of micro colonies present in the sample. In other embodiments, the cells may be observed on a microscope while they are growing. In some embodiments, after acquiring the necessary growth and stress data, the sample can be fixed directly and parallel single-cell imaging performed to read out the species identity of the microorganism of interest. This may be followed up with single molecule imaging to measure the presence of genes that may indicate current or future susceptibility to antimicrobials. The micro-colony level or single-cell level observation will drastically cut down the time required to go from sample to diagnosis, requiring on average a few (e.g. one, two, or three) cell divisions to occur before the readout step, and will provide clinicians with actionable information earlier than any existing technology. Furthermore, the present methods provide clinicians with the antimicrobial susceptibility information needed to deploy targeted antimicrobials and enable precise treatments tailored for each individual case, thereby reducing the spread of multi-drug resistance among microbial populations. A live/dead stain (e.g. viability dye) can also be incorporated in unused spectral channels, to distinguish single, living microorganisms which did not divide over the course of the assay from those that are dead.

[0155] In addition to antimicrobial susceptibility, other microbial phenotype measurements can be combined with HiPR-FISH species identification and quantification. In some embodiments, the tolerance or persistence of microbial cells in the presence of environmental stress can be determined by measuring the gene expression levels for stress response genes (e.g. RpoS, RpoN, and/or RpoE, which encodes the sigma factor that regulates the response to conditions of stress). In some embodiments, motility or chemotaxis measurements can be combined with HiPR-FISH to identify cellular motility in a taxa-specific fashion. In some embodiments, the production of reactive oxygen species (ROS), which play important roles in promoting microbial tolerance to environmental stress, can be measured and linked to the species identity of each cell. In some embodiments, the expression of Type 3 Secretion System (T3 SS) genes, which are used by certain pathogens to infect host cells and evade host immune response, can be measured and linked to species identity. In some embodiments, the expression of Type IV Secretion System (T4SS), which is related to the prokaryotic conjugation machinery and is involved in transport of proteins and DNA across the cell membrane, can be measured and linked to species identity. In some embodiments, the expression of quorum sensing genes, which are important in modulating collective behavior of communities containing many microbial cells, can be measured and linked to species identity. In some embodiments, the expression of genes related to biofilm formation can be measured and linked to species identity. In some embodiments, microbial cells can be subjected to a phage to identify phage-susceptible microbial species.

### Single Cell Imaging

[0156] In some embodiments, the present disclosure is directed to a method that achieves high phylogenetic resolution by taking advantage of the abundance of existing ribosomal subunit sequence information, such as the 16S ribosomal RNA sequence information, and a highly multiplexed binary encoding scheme. In some embodiments, each taxon from a list of taxa of microorganisms is probed with a custom designed taxon-specific targeting sequence, flanked by a subset of n unique encoding sequences. In some embodiments, each taxon is assigned a unique n-bit binary word, where 1 or 0 at the i^{th} bit indicates the taxon-specific targeting sequence is flanked or not flanked by the i^{h} encoding sequence. In some embodiments, a mixture of n decoding probes, each complementary to one of the n encoding sequences and conjugated to a unique label, is allowed to hybridize to their complementary encoding sequences. In some embodiments, the spectrum of labels for each cell is then detected using spectral imaging techniques. In some embodiments, the barcode identity for each cell can then be assigned using a support vector machine, using spectra of cells encoded with known barcodes or using computationally simulated spectra as training data.

[0157] In some embodiments, each taxon from a list of taxa of microorganisms is assigned a unique n-bit binary code selected from a plurality of unique n-bit binary codes, where n is an integer greater than 1.

[0158] A “binary code” refers to a representation of taxa using a string made up of a plurality of “0” and “1” from the binary number system. The binary code is made up of a pattern of n binary digits (n-bits), where n is an integer representing the number of labels used. The bigger the number n, the greater number of taxa can be represented using the binary code. For example, a binary code of eight bits (an 8-bit binary code, using 8 different labels) can represent up to 255 (2⁸−1) possible taxa. (One is subtracted from the total possible number of codes because no taxon is assigned a code of all zeros “00000000.” A code of all zeros would mean no decoding sequence, and thus no label, is attached. In other words, there are no non-labeled taxa.) Similarly, a binary code of ten bits (a 10-bit binary code) can represent up to 1023 (2¹⁰−1) possible taxa. In some embodiments a binary code may be translated into and represented by a decimal number. For example, the 10-bit binary code “0001100001” can also be represented as the decimal number “97.”

[0159] Each digit in a unique binary code represents whether a readout probe and the fluorophore corresponding to that readout probe are present for the selected species. In some embodiments, each digit in the binary code corresponds to a Readout probe (from Readout probe 1 (R1) through Readout probe n (Rn) in an n-bit coding scheme). In a specific embodiment, the n is 10 and the digits of an n-bit code correspond to R1 through R10. In some embodiments, the fluorophores that correspond to R1 through Rn are determined arbitrarily. For example, if n is 10, R1 can correspond to an Alexa 488 fluorophore, R2 can correspond to an Alexa 546 fluorophore, R3 can correspond to a 6-ROX (6-Carboxy-X-Rhodamine, or Rhodamine Red X) fluorophore, R4 can correspond to a Pacific Green fluorophore, R5 can correspond to a Pacific Blue fluorophore, R6 can correspond to an Alexa 610 fluorophore, R7 can correspond to an Alexa 647 fluorophore, R8 can correspond to a DyLight-510-LS fluorophore, R9 can correspond to an Alexa 405 fluorophore, and R10 can correspond to an Alexa532 fluorophore. Other n-bit and readout probes combinations are also contemplated herein. In some embodiments, other fluorophores including, but not limited to Hydroxycoumarin, methoxycoumarin, Cy2, FAM, Flourescein FITC, Alexa 430, R-phycoerythrin (PE), Tamara, Cy3.5 581, Rox, Alexa fluor 568, Red 613, Texas Red, Alexa fluor 594, Alexa fluor 633, Alexa fluor 660, Alexa fluor 680, Cy5, Cy 5.5, Cy 7, and Allophycocyanin are used in the n-bit encoding system.

[0160] In some embodiments, the n-bit binary code is between a 2-bit binary code and 50-bit binary code, a 2-bit binary code and 40-bit binary code, or 2-bit binary code and 30-bit binary code. In some embodiments, the n-bit binary code is selected from the group consisting of 2-bit binary code, 3-bit binary code, 4-bit binary code, 5-bit binary code, 6-bit binary code, 7-bit binary code, 8-bit binary code, 9-bit binary code, 10-bit binary-code, 11-bit binary code, 12-bit binary code, 13-bit binary code, 14-bit binary code, 15-bit binary code, 16-bit binary code, 17-bit binary code, 18-bit binary code, 19-bit binary code, 20-bit binary code, 21-bit binary code, 22-bit binary code, 23-bit binary code, 24-bit binary code, 25-bit binary code, 26-bit binary code, 27-bit binary code, 28 bit binary code, 29-bit binary code, 30-bit binary code, 31-bit binary code, 32-bit binary code, 33-bit binary code, 34-bit binary code, 35-bit binary code, 36-bit binary code, 37-bit binary code, 38 bit binary code, 39-bit binary code, 40-bit binary code, 41-bit binary code, 42-bit binary code, 43-bit binary code, 44-bit binary code, 45-bit binary code, 46-bit binary code, 47-bit binary code, 48 bit binary code, 49-bit binary code, and 50-bit binary code.

[0161] Encoding Probes

[0162] In some embodiments, the gene for a ribosomal subunit is used as a marker for phylogenetic placement. In some embodiments, 16S rRNA gene is used as a marker for phylogenetic placement. In some embodiments, methods of the present disclosure comprise multiplexed in-situ hybridization of encoding probes targeting taxon-specific segments of multiple unique 16S rRNA genes present in a microorganism population. In some embodiments, the 5S and/or 23S rRNA are used independently or in conjunction with 16S rRNA as a marker for phylogenetic placement. In some embodiments, if non-bacterial microorganisms are targeted, other rRNA may be targeted.

[0163] In some embodiments, a set of ending probes comprises subsets of encoding probes, wherein each subset targets a specific taxon. In some embodiments, a subset of encoding probes contains one unique targeting sequence specific to a taxon; that is, the encoding probes within a subset share a common targeting sequence specific to a taxon. In some embodiments, a subset of encoding probes contains multiple unique targeting sequences, each unique targeting sequence being specific to the same taxon as other targeting sequences within the same subset.

[0164] Targeting Sequences

[0165] In some embodiments, each encoding probe comprises a targeting sequence which is substantially complementary to a taxon-specific 16S rRNA sequence. By “substantially complementary” it is meant that the nucleic add fragment is capable of hybridizing to at least one nucleic acid strand or duplex even if less than all nucleobases base pair with a counterpart nucleobase. In certain embodiments, a “substantially complementary” nucleic add contains at least one sequence in which about 70%, about 71%, about 72%, about 73%, about 74%, about 75%, about 76%, about 77%, about 77%, 8%, about 79%, about 80%, about 81%, about 82%, about 83%, about 84%, about 85%, about 86%, about 87%, about 88%, about 89%, about 90%, about 91%, about 92%, about 93%, about 94%, about 95%, about 96%, about 97%, about 98%, about 99%, to about 100%, and any range therein, of the nucleobase sequence is capable of basepairing with at least one single or double stranded nucleic acid molecule during hybridization.

[0166] In some embodiments, the targeting sequence is designed to have a predicted melting temperature of between about 45° C. and about 65° C. or between about 55° C. and about 65° C. As used herein, the term “about” refers to an approximately ±10% variation from a given value. In some embodiments, the predicted melting temperature of the targeting sequence is 45° C., 46° C., 47° C., 48° C., 49° C., 50° C., 51° C., 52° C., 53° C., 54° C., 55° C., 56° C., 57° C., 58° C., 59° C., 60° C., 61° C., 62° C., 63° C., 64° C. or 65° C. In some embodiments, the targeting sequence has a GC content of about 55%, 60%, 65% or 70%.

[0167] In some embodiments, the taxon-specific targeting sequence in an encoding probe is designed as follows. At first, 16S sequences from a plurality of microorganisms are grouped by taxon and sequence similarity and a consensus sequence is generated for each taxon. In some embodiments, a targeting sequence specific for a consensus sequence is at least 10 nucleotides to at least 100 nucleotides long. In some embodiments, a targeting sequence specific for a consensus sequence is at least 15 nucleotides long, at least 16 nucleotides long, at least 17 nucleotides long, at least 18 nucleotides long, at least 19 nucleotides long, at least 20 nucleotides long, at least 21 nucleotides long, at least 22 nucleotides long, at least 23 nucleotides long, at least 24 nucleotides long, at least 25 nucleotides long, at least 26 nucleotides long, at least 27 nucleotides long, at least 28 nucleotides long, at least 29 nucleotides long, at least 30 nucleotides long, at least 35 nucleotides long, at least 40 nucleotides long, at least 45 nucleotides long, or at least 50 nucleotides long. In some embodiments, the candidate targeting sequence is aligned against a catalog of all full-length 16S rRNA sequences of a list of microorganisms. In a specific embodiment, the alignment is performed using Blastn (NCBI). In a specific embodiment, the alignment is performed using BWA. In a specific embodiment, the alignment is performed using bowtie. In a specific embodiment, the alignment is performed using bowtie2. In some embodiments, a maximum continuous homology (MCH) score, defined as the maximum number of continuous bases that are shared between the query and the target sequence, is calculated for each blast hit. In some embodiments, only candidate targeting sequences having blast hits to the consensus sequence above a threshold MCH score are considered significant and used for further analysis. In some embodiments, a blast on-target rate, defined as the ratio between the number of correct blast hits and the total number of significant blast hits, is calculated for each candidate targeting sequence having a significant BLAST hit. In some embodiments, any candidate targeting sequence with a blast on-target rate of less than 1 is excluded from the probe set to avoid ambiguity, and the remaining candidate targeting sequences are used as targeting sequences in encoding probe synthesis.

[0168] In some embodiments, the targeting sequence of an encoding probe is designed using publicly-available 16S rRNA sequence data. In some embodiments, the targeting sequence of an encoding probe is designed using publicly-available 23S rRNA sequence data. In some embodiments, the targeting sequence of an encoding probe is designed using publicly-available 5S rRNA sequence data. In some embodiments, the targeting sequence of an encoding probe design is designed using custom catalogues of 16S rRNA sequences. In some embodiments, the targeting sequence of an encoding probe design is designed using custom catalogues of 23S rRNA sequences. In some embodiments, the targeting sequence of an encoding probe design is designed using custom catalogues of 5S rRNA sequences. In some embodiments, the targeting sequence of an encoding probe is designed using publicly-available 16S-5S rRNA sequence data. In some embodiments, the targeting sequence of an encoding probe is designed using publicly-available 16S-5S-23S rRNA sequence data. In some embodiments, the targeting sequence of an encoding probe design is designed using custom catalogues of 16S-5S rRNA sequences. In some embodiments, the targeting sequence of an encoding probe design is designed using custom catalogues of 16S-5S-23S rRNA sequences. In a specific embodiment, high-quality, full-length 16S sequences are obtained by circular consensus sequencing (SMRT-CCS). In a specific embodiment, high-quality, full-length 16S sequences are obtained by Nanopore sequencing.

[0169] In some embodiments, SMRT-CCS of a 16S ribosomal sequence involves isolating ribosomal DNA from a microorganism. In a specific embodiment, DNA isolation is achieved using QIAamp DNA Mini Kit. In a specific embodiment, DNA isolation is achieved using DNeasy PowerSoil Pro Kit. In some embodiments, ribosomal DNA is amplified using universal primers. In some embodiments, the amplified ribosomal DNA is purified, and sequenced. In a specific embodiment, sequencing is performed on a PacBio Sequel instrument. In a specific embodiment, sequencing is performed on a PacBio Sequel IIe instrument. In a specific embodiment, sequencing is performed on a Nanopore MinION instrument. In a specific embodiment, sequencing is performed on a Nanopore GridION instrument. In a specific embodiment, sequencing is performed on a Nanopore PromethION instrument. In some embodiments, sequence data is processed to create a circular consensus sequence with a threshold of 99% accuracy. In a specific embodiment, the sequence data processing is achieved using rDnaTools. In some embodiments, the circular consensus sequences are used for probe design. In some embodiments, to increase the sequence design space, and to improve identification of closely related species, the workflow uses a full 16S-23S rRNA region. In some embodiments, to increase the sequence design space, and to improve identification of closely related species, the workflow uses a full 16S-5S-23S rRNA region.

[0170] In some embodiments, the targeting sequence of an encoding probe is designed using a database that is relevant for a system. In a specific embodiment, the system is the gut microbiome. In some embodiments, the targeting sequence of an encoding probe is designed using a database that is relevant for a disease or infection.

[0171] Spacers

[0172] In some embodiments, a targeting sequence in an encoding probe is concatenated on both ends with 3 nucleotide (3-nt) spacers. In some embodiments, the 3-nt spacers comprise a random string of three nucleotides. In some embodiments, the 3-nt spacers are sequences designed from the 16S rRNA molecule, 5S rRNA molecule, or 23S rRNA molecule (i.e., three nucleotides upstream and downstream of the selected 16S targeting sequence is used as the 3-nt spacers). In some embodiments the spaces are non-nucleotide chemical spacers. Non-nucleotide chemical spacers include, but are not limited to, hexanediol, hexa-ethyleneglycol, or triethylene glycol spacers.

[0173] Readout Sequences

[0174] In some embodiments, a targeting sequence is concatenated to at least one readout sequence depending on the unique n-bit binary code assigned to the taxon that the targeting sequence is specific for. Each readout sequence is substantially complementary to the sequence of a corresponding labeled readout probe.

[0175] In some embodiments, a readout sequence is at least 15 nucleotides long, at least 16 nucleotides long, at least 17 nucleotides long, at least 18 nucleotides long, at least 19 nucleotides long, at least 20 nucleotides long, at least 21 nucleotides long, at least 22 nucleotides long, at least 23 nucleotides long, at least 24 nucleotides long, at least 25 nucleotides long, at least 26 nucleotides long, at least 27 nucleotides long, at least 28 nucleotides long, at least 29 nucleotides long, or at least 30 nucleotides long. In some embodiments, candidate readout sequences are blasted against a nucleotide database to ensure that they are not substantially complementary to regions of 16S ribosomal sequences.

[0176] Forward and Reverse Primers

[0177] In some embodiments, a targeting sequence is concatenated to a set of sequences (forward primer and reverse primer sequences) that are substantially complementary to primers that can be used to amplify the encoding probe in a polymerase chain reaction (PCR). In some embodiments, the forward and reverse primers are designed to have predicted melting temperatures of between about 55° C. and about 65° C. As used herein, the term “about” refers to an approximately ±10% variation from a given value. In some embodiments, the predicted melting temperature of the forward and reverse primers are 55° C., 56° C., 57° C., 58° C., 59° C., 60° C., 61° C., 62° C., 63° C., 64° C. or 65° C. In some embodiments, the forward and reverse primers have a GC content of about 55%, 60%, 65% or 70%.

[0178] In some embodiments, the set of forward and reverse primers are designed such that the set of forward and reverse primers are not substantially complementary to the targeting sequence or readout sequences. In some embodiments, the set of forward and reverse primers are designed such that the set of forward and reverse primers are not substantially complementary to any sequences that are substantially complementary to the targeting sequence or readout sequences. In a specific embodiment, the set of forward primer and reverse primer sequences comprise the nucleotide sequence CGATGCGCCAATTCCGGTTC (SEQ ID NO: 1808) and the nucleotide sequence GTCTATTTTCTTATCCGACG (SEQ ID NO: 1809).

[0179] In some embodiments, the forward primer or the reverse primer is at least 15 nucleotides long, at least 16 nucleotides long, at least 17 nucleotides long, at least 18 nucleotides long, at least 19 nucleotides long, at least 20 nucleotides long, at least 21 nucleotides long, at least 22 nucleotides long, at least 23 nucleotides long, at least 24 nucleotides long, at least 25 nucleotides long, at least 26 nucleotides long, at least 27 nucleotides long, at least 28 nucleotides long, at least 29 nucleotides long, or at least 30 nucleotides long.

[0180] Decoding Probes

[0181] In some embodiments, the present disclosure utilizes a set of n number of decoding probes representing an n-bit coding scheme where n is an integer. In some embodiments, each probe in the set of decoding probes corresponds to a digit in the plurality of unique n-bit binary codes.

[0182] In some embodiments, each probe in the set of decoding probes is conjugated with a label that provides a detectable signal.

[0183] In some embodiments, each probe in a set of decoding probes is labeled different from other probes in the set, and each decoding probe is substantially complementary to a corresponding readout sequence selected from a set of n number of readout sequences.

[0184] In some embodiments, the detectable signal is a cyanine dye (e.g., Cy2, Cy3, Cy3B, Cy5, Cy5.5, Cy7, etc.), Alexa Fluor dye, Atto dye, photo switchable dye, photoactivatable dye, fluorescent dye, metal nanoparticle, semiconductor nanoparticle or “quantum dots”, fluorescent protein such as GFP (Green Fluorescent Protein), or photoactivatable fluorescent protein, such as PAGFP, PSCFP, PSCFP2, Dendra, Dendra2, EosFP, tdEos, mEos2, mEos3, PAmCherry, PAtagRFP, mMaple, mMaple2, and mMaple3.

[0185] In a specific embodiment, the detectable signal is a fluorophore. In some embodiments, the detectable signal is a fluorophore that emits light in infrared or near-infrared. In a specific embodiment, the fluorophore is selected from the group consisting of Alexa 405, Pacific Blue, Pacific Green, Alexa 488, Alexa 532, Alexa 546, Rhodamine Red X, Alexa 610, Alexa 647, and DyLight-510-LS, Hydroxycoumarin, methoxycoumarin, Cy2, FAM, Fluorescein FITC, Alexa 430, R-phycoerythrin (PE), Tamara, Cy3.5 581, Rox, Alexa fluor 568, Red 613, Texas Red, Alexa fluor 594, Alexa fluor 633, Alexa fluor 660, Alexa fluor 680, Cy5, Cy5.5, Cy7, Allophycocyanin, and ROX (carboxy-X-rhodamine). In some embodiments, the detectable signal is Alexa Fluor 350, Alexa Fluor 405, Alexa Fluor 430, Alexa Fluor 488, Alexa Fluor 514, Alexa Fluor 532, Alexa Fluor 546, Alexa Fluor 555, Alexa Fluor 561, Alexa Fluor 568, Alexa Fluor 594, Alexa Fluor 610, Alexa Fluor 633, Alexa Fluor 635, Alexa Fluor 647, Alexa Fluor 647-R-phycoerythrin, Alexa Fluor 660, Alexa Fluor 680, Alexa Fluor 680-allophycocyanin, Alexa Fluor 700, Alexa Fluor 750, Alexa Fluor 790, Alexa Fluor Plus 405, Alexa Fluor Plus 488, Alexa Fluor Plus 555, Alexa Fluor Plus 594, Alexa Fluor Plus 647, Alexa Fluor Plus 680, Alexa Fluor Plus 750, Alexa Fluor Plus 800, Pacific Blue, Pacific Green, Rhodamine Red X, DyLight 485-LS, DyLight-510-LS, DyLight 515-LS, DyLight 521-LS, Hydroxycoumarin, methoxycoumarin, Cy2, FAM, Fluorescein FITC, R-phycoerythrin (PE), Tamara, Cy3.5 581, ROX (carboxy-X-rhodamine), Red 613, Texas Red, Cy5, Cy5.5, Cy7, Allophycocyanin, ATTO 430LS, ATTO 490LS, ATTO 390, ATTO 425, Cyan 500 NHS-Ester, ATTO 465, ATTO 488, ATTO 495, ATTO Rho110, ATTO 514, ATTO 520, ATTO 532, ATTO Rho6G, ATTO 542, ATTO 550, ATTO 565, ATTO Rho3B, ATTO Rho11, ATTO Rho12, ATTO Thio12, ATTO Rho101, ATTO 590, ATTO 594, ATTO Rho13, ATTO 610, ATTO 620, ATTO Rho14, ATTO 633, ATTO 643, ATTO 647, ATTO 647N, ATTO 655, ATTO Oxa12, ATTO 665, ATTO 680, ATTO 700, ATTO 725, ATTO 740.

[0186] In some embodiments, a readout probe is at least 10 nucleotides long, at least 11 nucleotides long, at least 12 nucleotides long, at least 13 nucleotides long, at least 14 nucleotides long, at least 15 nucleotides long, at least 16 nucleotides long, at least 17 nucleotides long, at least 18 nucleotides long, at least 19 nucleotides long, at least 20 nucleotides long, at least 21 nucleotides long, at least 22 nucleotides long, at least 23 nucleotides long, at least 24 nucleotides long, at least 25 nucleotides long, at least 26 nucleotides long, at least 27 nucleotides long, at least 28 nucleotides long, at least 29 nucleotides long, or at least 30 nucleotides long.

[0187] Imaging

[0188] In some embodiments, the labels used in the present methods are imaged using a microscope. In some embodiments, the microscope is a confocal microscope. In some embodiments, the microscope is a fluorescence microscope. In some embodiments, the microscope is a light-sheet microscope. In some embodiments, the microscope is a super-resolution microscope.

[0189] Barcode Decoding

[0190] In some embodiments, a support vector machine is trained on reference data to predict the barcode of single cells in the synthetic communities and environmental samples. In a specific embodiment, the support vector machine is Support Vector Regression (SVR) from Python package. As used herein, the term “support-vector machine” (SVM) refers to a supervised learning model with associated learning algorithms that analyze data used for classification and regression analysis. Given a set of training examples, each marked as belonging to one or the other of two categories, an SVM training algorithm builds a model that assigns new examples to one category or the other, making it a non-probabilistic binary linear classifier. An SVM model is a representation of the examples as points in space, mapped so that the examples of the separate categories are divided by a clear gap that is as wide as possible. New examples are then mapped into that same space and predicted to belong to a category based on which side of the gap they fall.

[0191] In some embodiments, the reference spectra are obtained through a brute force approach involving the measurement of the spectra of all possible barcodes using barcoded test E. coli cells. In some embodiments, the n-bit binary encoding is a 10-bit binary encoding and tire reference spectra are obtained through measuring 1023 reference spectra.

[0192] In some embodiments the reference spectra are obtained by simulation of all possible spectra. In some embodiments, the simulated spectral data can be used as reference examples for the support vector machine. In some embodiments, the spectra corresponding to individual n-bit binary codes are simulated by adding together the measured spectra of each individual fluorophore (e.g., the reference spectrum for 0000010011 is generated by adding the spectra of R1, R2, and R5; or the reference spectrum for 1010010100 is generated by adding the spectra of R3, R5, R8 and R10). In some embodiments, the spectra corresponding to individual n-bit binary codes are simulated by adding the measured spectra of each individual fluorophore weighted by the relative contribution to the emission signal of each fluorophore. In some embodiments, the relative contribution of each fluorophore is calculated using a Forster Resonant Energy Transfer (FRET) model.

[0193] In one aspect, the disclosure is directed to a computer-readable storage device storing computer readable instructions, which when executed by a processor causes the processor to assign each taxon in a list of taxa of microorganisms a unique n-bit binary code selected from a plurality of unique n-bit binary codes, and design decoding and encoding probes suitable for use in such n-bit binary coding scheme.

[0194] The phrase “computer-readable storage device” refers to a computer readable storage device or a computer readable signal medium. A computer-readable storage device, may be, for example, a magnetic, optical, electronic, electromagnetic, infrared, or semiconductor system, apparatus, or device, or any suitable combination of the foregoing; however, the computer readable storage device is not limited to these examples except a computer readable storage device excludes computer readable signal medium Additional examples of the computer readable storage device can include: a portable computer diskette, a hard disk, a magnetic storage device, a portable compact disc read-only memory (CD-ROM), a random access memory' (RAM), a read-only memory (ROM), an erasable programmable read-only memory (EPROM or Flash memory), an optical storage device, or any appropriate combination of the foregoing; however, the computer readable storage device is also not limited to these examples.

[0195] Any tangible medium that can contain, or store, a program for use by or in connection with an instruction execution system, apparatus, or device could be a computer readable storage device.

[0196] A computer readable signal medium may include a propagated data signal with computer readable program code embodied therein, such as, but not limited to, in baseband or as part of a carrier wave. A propagated signal may take any of a plurality of forms, including, but not limited to, electro-magnetic, optical, or any suitable combination thereof. A computer readable signal medium may be any computer readable medium (exclusive of computer readable storage device) that can communicate, propagate, or transport a program for use by or in connection with a system, apparatus, or device. Program code embodied on a computer readable signal medium may be transmitted using any appropriate medium, including but not limited to wireless, wired, optical fiber cable, RF, etc., or any suitable combination of the foregoing. The term “memory” as used herein comprises program memory' and working memory. The program memory may have one or more programs or software modules. The working memory stores data or information used by the CPU in executing the functionality described herein.

[0197] The term “processor” may include a single core processor, a multi-core processor, multiple processors located in a single device, or multiple processors in wired or wireless communication with each other and distributed over a network of devices, the Internet, or the cloud. Accordingly, as used herein, functions, features or instructions performed or configured to be performed by a “processor”, may include the performance of the functions, features or instructions by a single core processor, may include performance of the functions, features or instructions collectively or collaboratively by multiple cores of a multi-core processor, or may include performance of the functions, features or instructions collectively or collaboratively by multiple processors, where each processor or core is not required to perform every function, feature or instruction individually. The processor may be a CPU (central processing unit). The processor may comprise other types of processors such as a GPU (graphical processing unit). In other aspects of the disclosure, instead of or in addition to a CPU executing instructions that are programmed in the program memory, the processor may be an ASIC (application-specific integrated circuit), analog circuit or other functional logic, such as a FPGA (field-programmable gate array), PAL (Phase Alternating Line) or PLA (programmable logic array).

[0198] The CPU is configured to execute programs (also described herein as modules or instructions) stored in a program memory to perform the functionality described herein. The memory may be, but not limited to, RAM (random access memory), ROM (read only memory) and persistent storage. The memory is any piece of hardware that is capable of storing information, such as, for example without limitation, data, programs, instructions, program code, and/or other suitable information, either on a temporary basis and/or a permanent basis.

[0199] In some embodiments, a computer-readable storage device comprises instructions for assigning each taxon in a list of taxa of microorganisms a unique n-bit binary code selected from a plurality of unique n-bit binary codes; designing a set of n number of decoding probes, wherein each decoding probe corresponds to a digit in the n-bit binary code, and where each decoding probe is substantially complementary to a readout sequence selected from a set of n number of readout sequences, and designing a set of encoding probes, where the set of encoding probes includes a plurality of subsets of encoding probes, wherein each encoding probe comprises a targeting sequence and one or more readout sequences, the encoding probes within each subset comprise a targeting sequence that is specific to a taxon in tire list of taxa of microorganisms and is different from a targeting sequence of the encoding probes of another subset, and the readout sequences in the encoding probes within a subset are selected from the set of n number of readout sequences based on the unique n-bit binary code assigned to the taxon which the targeting sequence of the subset is specific to.

[0200] In some embodiments, the computer-readable storage device comprises instructions for designing encoding probes of a subset, wherein the targeting sequence in the encoding probes of a subset is substantially complementary to a consensus 16S ribosomal sequence specific to a taxon. In some embodiments, the computer-readable storage device comprises instructions for designing encoding probes of a subset, wherein the targeting sequence in the encoding probes of a subset is substantially complementary to a consensus 5S ribosomal sequence specific to a taxon. In some embodiments, the computer-readable storage device comprises instructions for designing encoding probes of a subset, wherein the targeting sequence in the encoding probes of a subset is substantially complementary to a consensus 23S ribosomal sequence specific to a taxon. In some embodiments, the computer-readable storage device comprises instructions for designing encoding probes of a subset, wherein the targeting sequence in the encoding probes of a subset is substantially complementary to a consensus 16S-5S ribosomal sequence specific to a taxon. In some embodiments, the computer-readable storage device comprises instructions for designing encoding probes of a subset, wherein the targeting sequence in the encoding probes of a subset is substantially complementary to a consensus 16S-5S-23S ribosomal sequence specific to a taxon. In some embodiments, the computer-readable storage device comprises instructions for designing encoding probes of a subset, wherein the targeting sequence in the encoding probes of a subset is substantially complementary to a consensus 16S-23S ribosomal sequence specific to a taxon. In some embodiments, the targeting sequence is blasted against a nucleotide database to ensure that the target sequence is not substantially complementary to any sequence other than the consensus 16S ribosomal sequence to which the target sequence is specific.

[0201] In some embodiments, a set of encoding probes comprises subsets of encoding probes, wherein each subset targets a specific taxon. In some embodiments, a subset of encoding probes contains one unique targeting sequence specific to a taxon; that is, the encoding probes within a subset share a common targeting sequence specific to a taxon. In some embodiments, a subset of encoding probes contains multiple unique targeting sequences, each unique targeting sequence being specific to the same taxon as other targeting sequences within the same subset.

### Microbial Cell Growth

[0202] In some embodiments, the microbial cell in the sample is identified and characterized directly from the sample. In some embodiments, the microbial cell in the sample is identified and characterized after culturing. In some embodiments, the microbial cell in the sample is cultured for numerous cell divisions. A skilled artisan would readily recognize that the number of cell divisions depends on the species doubling time, which varies from species to species. In some embodiments, the microbial cell in the sample is cultured for one to numerous cell divisions. In some embodiments, the microbial cell in the sample is cultured for less than one division cycle. In some embodiments, the microbial cell in the sample is cultured for very few cell division cycles. In some embodiments, the microbial cell in the sample is cultured for about 1 to about 12 cell division cycles. In some embodiments, the microbial cell in the sample is cultured for about 1, about 2, about 3, about 4, about 5, about 6, about 7, about 8, about 9, about 10, about 11, or about 12 cell division cycles. In some embodiments, the microbial cell in the sample is cultured for about 1 minute to about 12 hours. In some embodiments, the microbial cell in the sample is cultured for about 1 minute, about 2 minutes, about 3 minutes, about 4 minutes, about 5 minutes, about 6 minutes, about 7 minutes, about 8 minutes, about 9 minutes, about 10 minutes, about 11 minutes, about 12 minutes, about 13 minutes, about 15 minutes, about 16 minutes, about 17 minutes, about 18 minutes, about 19 minutes, about 20 minutes, about 25 minutes, about 30 minutes, about 35 minutes, about 40 minutes, about 45 minutes, about 50 minutes, about 55 minutes, about 60 minutes, about 80 minutes, about 90 minutes, about 1 hour, about 1.5 hours, about 2 hours, about 2.5 hours, about 3 hours, about 3.5 hours, about 4 hours, about 4.5 hours, about 5 hours, about 5.5 hours, about 6 hours, about 6.5 hours, about 7 hours, about 7.5 hours, about 8 hours, about 8.5 hours, about 9 hours, about 9.5 hours, about 10 hours, about 10.5 hours, about 11 hours, about 11.5 hours, or about 12 hours.

### Antimicrobial Susceptibility Testing

[0203] To enable rapid antimicrobial resistance profiling, the present methods combine fluorescence in situ hybridization to enable the first hybrid measurements of antimicrobial resistance (FIG. 1A) using both genotypic and phenotypic information. FIG. 1A shows a concept for rapid phenotypic profiling of antibiotic resistance followed by microbial identification using imaging. Microbes are cultured for a short amount of time (minutes) before fixation and imaging. Multimodal imaging using single-molecule FISH and metabolic labeling can provide phenotypic and genotypic information on cellular metabolism and antimicrobial resistance. This technique allows identification of microorganism species and assessment of microorganism growth and replication in the presence and absence of known concentrations of different antimicrobials in order to accurately determine antimicrobial susceptibility testing results in less time required than other methods known in the art.

[0204] One or more microbes in a specimen can be directly inoculated onto a device with patterned compartments. The testing can proceed with or without further culturing. In scenarios where the sample is not subjected to culturing, species identification FISH methods, such as HiPR-FISH, and single-molecule FISH to simultaneously image the species identity is combined with analysis regarding the presence or absence of one or more antimicrobial genes and metabolites, proteins, carbohydrates, and/or lipids in the same cells. This approach will enable a paired readout of microbial species identity and antimicrobial susceptibility. In situations where phenotypic readout of antimicrobial susceptibility is desired, the compartments will be filled with a culturing media containing an antimicrobial drug at a known concentration. An initial image will be taken to record the number of cells in each compartment of the device. The microbes are allowed to replicate for a defined period of time (minutes to a few hours). After the growth period, another image or measurement will be taken to record cellular state in each compartment of the device after the growth period and look for the presence of genes and metabolites, proteins, carbohydrates, and/or lipids that are known to confer antimicrobial resistance. The cellular state can potentially be read out in a few different ways. For example, cellular state can be measured simply by counting the number of cells in each compartment. Cell growth can also be measured by probing the metabolic product concentration in the solution such as dissolved CO₂ or measuring the amount of heat dissipation using calorimetry techniques. Cellular state can also be inferred by measuring the abundance of expressed metabolic genes or stress response genes using single-molecule fluorescence in situ hybridization. Cellular state may also be measured using a simple live/dead stain. After cellular state measurement, the identity of the cells will subsequently be read out using multiplexed fluorescence in situ hybridization (e.g. HiPR-FISH) (FIG. 1B). Binary labeling approach for highly multiplexed labeling of microbes for taxonomic identification. Microbes from different taxa are labeled with unique combinations of fluorophores. The combined spectra are measured using a microscope in spectral imaging mode. Measured spectra are classified using a custom machine learning algorithm. This test can be repeated in several different culture media to make the analysis as comprehensive as possible. Altogether, the present methods enable rapid measurement of pathogen identity, their associated minimally inhibitory concentration for antimicrobials, and potential future susceptibility to antimicrobials.

[0205] In some aspects, the present disclosure provides methods determining the susceptibility (or resistance) of the microbial cells in the sample to one or more antimicrobial agents. In some aspects, the present disclosure provides methods of identifying microbial cells in a sample in parallel with determination of the microbial cells in the sample susceptibility to one or more antimicrobial agents. As used herein, a microbial cell is “susceptible” to an antimicrobial when it is inhibited by the usually achievable concentration of the antimicrobial agent when the dosage recommended to treat the site of infection is used. Further, as used herein, a microbial cell is “resistant” to an antimicrobial when it is not inhibited by the usually achievable concentration of an antimicrobial agent with normal dosage schedules and/or that has a minimum inhibitory concentration that falls in the range in which specific microbial resistance mechanisms are likely.

[0206] In some embodiments, the microbial cells in a sample are exposed to different concentrations to determine the minimum inhibitory concentration of the antimicrobial agent. In some embodiments, the minimum inhibitory concentration (MIC) of the antimicrobial agent for the microbial cell in the sample is greater than the MIC of a typical microbial cell of the same strain. In some embodiments, the minimum inhibitory concentration (MIC) of the antimicrobial agent for the microbial cell in the sample is lower than the MIC of a typical microbial cell of the same strain.

[0207] In some embodiments, the microbial cells in the sample are exposed to one or more antimicrobial agents in a concentration range of about 2-fold to about 500-fold of the MIC of a typical microbial cell of the same strain. In some embodiments, the microbial cells in the sample are exposed to one or more antimicrobial agents in a concentration range of about 2-fold, about 3-fold, about 4-fold, about 5-fold, about 6-fold, about 7-fold, about 8-fold, about 9-fold, about 10-fold, about 11-fold, about 12-fold, about 13-fold, about 14-fold, about 15-fold, about 16-fold, about 17-fold, about 18-fold, about 19-fold, about 20-fold, about 25-fold, about 30-fold, about 35-fold, about 40-fold, about 45-fold, about 50-fold, about 60-fold, about 70-fold, about 80-fold, about 90-fold, about 100-fold, about 150-fold, about 200-fold, about 250-fold, about 300-fold, about 350-fold, about 400-fold, about 450-fold, or about 500-fold of the MIC of a typical microbial cell of the same strain.

[0208] Any appropriate antimicrobial agent effective against a microbial cell disclosed herein may be used in the methods of the present disclosure. In some embodiments, the one or more antimicrobial agents include, but are not limited to rifamycins, rifampicin, aminoglycosides, fluoroquinolones, penicillins, carbapenems, cephalosporins antibiotic, penicillinase-resistant penicillins, aminopenicillins, β-lactams, tetracyclines, sulfonamides, phenicols, trimethoprim, macrolides, fosfomycin, erythromycin, azithromycin, clarithromycin, dirithromycin, troleandomycin, synthetic drugs quinolones, sulfonamides, trimethoprim, sulfamethoxazole, streptomycin, glycopeptides, glycylcyclines, ketolides, lipopeptides, monobactams, nitroimidazoles, oxazolidinones, polymixins, benzilpenicilline, aminoglycosides, amikacin, arbekacin, gentamicin, kanamycin, neomycin, netilmicin, paromomycin, rhodostreptomycin, streptomycin, tobramycin, apramycin, amphotericin, nystatin, pimaricin, fluconazole, itraconazole, voriconazole, posaconazole, isavuconazole, ketoconazole, echinocandins, polyenes, allylamines, naftifine, terbinafine, morpholines, amorolfine, 5-fluorocytosine, atovaquone/proguanil, malarone, chloroquine, doxycycline, mefloquine, primaquine, meropenem, and tafenoquine.

[0209] In some embodiments, survival, growth or development of the microbial cell in a sample is determined by counting the number of cells observed. In some embodiments, survival, growth or development of the microbial cell in a sample is determined by counting the number of cells observed relative to unperturbed wells. In some embodiments, survival, growth or development of the microbial cell in a sample is determined by measuring cell metabolism. In some embodiments, growth or development of the microbial cell in a sample is determined by measuring cell metabolism at varying concentrations of one or more antimicrobial agents. In some embodiments, metabolic measurements include, but are not limited to, concentration of dissolved carbon dioxide, heat dissipation, oxygen consumption, expressed genes involved in cell homeostasis, stress response, division, and/or growth, and/or cell membrane integrity, and/or cell wall integrity, and/or S-layer integrity (live/dead stain).

### Inference of Potential Antimicrobial Resistance.

[0210] To enable prediction of antimicrobial resistance in the future, HiPR-FISH can be applied to not only measure the microbial identity via the rRNA sequences, but also measure the presence of antimicrobial genes, proteins, or metabolic products. To measure the presence of antimicrobial genes, panels of probes that are specific and only specific to a list of antimicrobial genes are designed. These probes are similarly encoded into binary barcodes by adding flanking sequences to the encoding sequences. These flanking sequences may be readout sequences or sequences for additional signal amplification. In the case where the flanking sequences are readout sequences, the specimen can be hybridized with readout probes and imaged on an imaging device. In the case where the flanking sequences are initiator sequences, the specimen is subjected to a round of signal amplification using amplifier probes. The amplifier probes may be conjugated with fluorophores. If the amplifier probes are already conjugated with fluorophores, the specimen can be imaged on an imaging device after amplification hybridization. If the amplifiers are not conjugated with fluorophores, the amplifier probes will contain a readout sequence. The amplified specimen is then hybridized with fluorescently labeled readout probes before being imaged on an imaging device. To measure the presence of antimicrobial proteins, antibodies conjugated with DNA readout sequences are engineered. The DNA barcoded antibodies will bind to proteins of interest, and the labeled specimen will be hybridized with fluorescently labeled readout probes before being imaged on an imaging device. To measure metabolic products such as sugars or lipids, DNA barcodes will be conjugated to molecules that bind specifically to the sugars or lipids of interest. The labeled specimen will then be hybridized with fluorescently labeled readout probes before being imaged on an imaging device. For measurement of proteins, sugars, and/or lipids, amplifier probes may also be used in a similar fashion as described for gene targets to increase signal and reduce the influence of noise. Examples of imaging devices include, but are not limited to, epifluorescent microscopes, confocal microscopes, multi-photon microscopes, and light-sheet microscopes.

[0211] Any number of genetic changes can affect the susceptibility of an organism to an antimicrobial agent or drug. For example, permeability changes in the bacterial cell wall can restrict antimicrobial access to target sites, changes in pumps can alter the efflux of the antimicrobial from the cell, proteins may enzymatically modify or degrade the antimicrobial agent, the cell may acquire an alternative metabolic pathway to that inhibited by the antimicrobial agent, the target of the antimicrobial agent may be modified, or the target enzyme may be overproduced.

[0212] In some embodiments, the present methods detect mutations that influence the development of antimicrobial resistance or susceptibility, such as nucleotide substitutions in the 23S rRNA gene that cause macrolide resistance, single nucleotide polymorphisms in ribosomal proteins such as L4 or L22, mutations within the rpsL gene, or frame shift mutation in ddl gene encoding a cytoplasm enzyme D-Ala-D-Ala ligase.

[0213] In some embodiments, the present methods can identify genetic changes in the microorganism compared to unmodified microorganisms of the same type. In some embodiments, the present methods identify deletions, duplications, single nucleotide polymorphisms (SNPs), frame-shift mutations, inversions, insertions, and/or substitutions associated with the development of susceptibility or resistance to a given antimicrobial agent. In some embodiments, the present methods identify mutations associated with increased drug resistance in genes including, but not limited to, genes encoding multidrug resistance proteins (e.g. PDR1, PDR3, PDR7, PDR9), ABC transporters (e.g. SNQ2, STE6, PDR5, PDR10, PDR11, YOR1), membrane associated transporters (GAS1, D4405), soluble proteins (e.g. G3PD), RNA polymerase, rpoB, gyrA, gyrB, 16S RNA, 23S rRNA, NADPH nitroreductase, sul2, strAB, tetAR, aac3-iid, aph, sph, cmy-2, floR, tetB, aadA, aac3-VIa, and sul1.

### Microorganisms

[0214] In some aspects, the present disclosure provides methods for identifying and characterizing an infectious microorganism such as a virus, bacterium, parasite, or fungus. The infectious microorganism can be a microorganism that causes infections in a human or an animal such as a species of livestock, poultry, and fish.

[0215] In some embodiments, the list of phyla of microorganisms include phyla Actinobacteria, Aquiflcae, Armatimonadetes, Bacteroidetes, Chlamydiae, Chlorobi, Chloroflexi, Chrysiogenetes, Cyanobacteria, Chrysiogenetes, Deferribacteres, Deinococcus-thermus, Dictyoglomi, Elusimicrobia, Fibrobacteres, Firmicutes, Fusobacteria, Gemmatimonadetes, Lentisphaerae, Nitrospirae, Planctomycetes, Proteobacteria, Spirochaetia, Synergistetes, Thermodesulfobacteria, Thermotogae, and Verrucomicrobia.

[0216] In some embodiments, the present disclosure provides methods for identifying and characterizing a virus including but not limited to, bacteriophage, RNA bacteriophage (e.g. MS2, AP205, PP7 and Qβ), Helicobacter pylori, infectious haematopoietic necrosis virus (IHNV), parvovirus, Herpes Simplex Virus, Hepatitis A virus, Hepatitis B virus, Hepatitis C virus, Measles virus, Mumps virus, Rubella virus, Human Immunodeficiency Virus (HIV), Influenza virus, Rhinovirus, Rotavirus A, Rotavirus B, Rotavirus C, Respiratory Syncytial Virus (RSV), Varicella zoster, Poliovirus, Norovirus, Zika Virus, Dengue Virus, Rabies Virus, Newcastle Disease Virus, and White Spot Syndrome Virus. In some embodiments, the methods identify and characterize a cell (e.g. human cell) infected with a virus of the disclosure.

[0217] In some embodiments, the present disclosure provides methods for identifying and characterizing a bacterium including but not limited to, Mycobacterium, Streptococcus, Staphylococcus, Shigella, Campylobacter, Salmonella, Clostridium, Corynebacterium, Pseudomonas, Neisseria, Listeria, Vibrio, Bordetella, E. coli (including pathogenic E. coli), Pseudomonas aeruginosa, Enterobacter cloacae, Mycobacterium tuberculosis, Staphylococcus aureus, Helicobacter pylori, and Legionella. In some embodiments, the present disclosure provides methods for identifying and characterizing a bacterium including, but not limited to, Acinetobacter baumannii, Citrobacter freundii, Citrobacter koseri, Enterobacter cloacae, Enterococcus faecalis, Enterococcus faecium, Escherichia coli, Klebsiella oxytoca, Klebsiella pneumoniae, Proteus mirabilis, Proteus vulgaris, Pseudomonas aeruginosa, Serratia marcescens, Staphylococcus aureus, Staphylococcus saprophyticus, Streptococcus agalactiae, or a combination thereof.

[0218] In some embodiments, the present disclosure provides methods for identifying and characterizing a parasite including but not limited to, Plasmodium (i.e. P. falciparum, P. malariae, P. ovale, P. knowlesi, and P. vivax), Trypanosoma, Toxoplasma, Giardia, and Leishmania, Cryptosporidium, helminthic parasites: Trichuris spp. (whipworms), Enterobius spp. (pinworms), Ascaris spp. (roundworms), Ancylostoma spp. and Necator spp. (hookworms), Strongyloides spp. (threadworms), Dracunculus spp. (Guinea worms), Onchocerca spp. and Wuchereria spp. (filarial worms), Taenia spp., Echinococcus spp., and Diphyllobothrium spp. (human and animal cestodes), Fasciola spp. (liver flukes) and Schistosoma spp. (blood flukes).

[0219] In some embodiments, the present disclosure provides methods for identifying and characterizing a fungus including but not limited to, Aspergillus, Candida, Blastomyces, Coccidioides, Cryptococcus, Pneumocystis, Mucor, Rhizopus, Rhizomucor, Fusarium, Scedosporium, and Histoplasma.

### Kits

[0220] Another aspect of the disclosure is directed to kits that allow practicing the methods of the present disclosure.

[0221] In some embodiments, the disclosure is directed to a kit which includes a list of taxa of microorganisms, wherein each taxon is assigned a unique n-bit binary code selected from a plurality of unique n-bit binary codes, wherein n is an integer greater than 1; a set of n number of decoding probes, wherein each decoding probe corresponds to a digit in the plurality of unique n-bit binary codes, is conjugated with a label that provides a detectable signal, wherein the labels on the decoding probes are different from each other, and is substantially complementary to a readout sequence selected from a set of n number of readout sequences; and instructions on how to design a set of encoding probes, wherein the set of encoding probes includes a plurality of subsets of encoding probes, wherein each encoding probe comprises a targeting sequence and one or more readout sequences, the encoding probes within each subset comprise a targeting sequence that is specific to a taxon in the list of taxa of microorganisms and is different from a targeting sequence of the encoding probes of another subset, and the readout sequences in the encoding probes within a subset are selected from the set of n number of readout sequences based on the unique n-bit binary code assigned to the taxon which the targeting sequence of the subset is specific to.

[0222] In some embodiments, the encoding probes within each subset comprise at least one targeting sequence that is specific to a taxon. In some embodiments, the encoding probes within each subset comprise at least two targeting sequences that are specific to the same taxon.

[0223] In some embodiments, the kit includes a device to practice the methods of the present disclosure. In some embodiments, the device is a multiwell platform. In some embodiments, the multiwell platform contains between 2 and 400 well, or 2 and 384 well, or 8 and 100 well. In some embodiments, the multiwell platform contains 2 wells, 3 wells, 4 wells, 5 wells, 6 wells, 7 wells, 8 wells, 9 wells, 10 wells, 12 wells, 24 wells, 25 wells, 30 wells, 48 wells, 50 wells, 75 wells, 96 wells, 100 wells, 150 wells, 200 wells, 250 wells, 300 wells, 350 wells, 384 wells, or 400 wells. In some embodiments, the wells contain drug-inoculated or drug-free agar, agarose, polyethylene glycol, or polyacrylamide. In some embodiments, the devices are a single or a double layer of silicon. In some embodiments, a plastic flow chamber is attached for HiPR-FISH processing and readout.

### Biological Samples

[0224] The methods disclosed herein can be performed directly in a biological sample, without the need to isolate and culture microorganisms. In some embodiments, the biological sample is a biological fluid or a tissue sample. In some embodiments, the biological sample includes, but is not limited to, bronchoalveolar lavage fluid (BAL), blood, serum, plasma, urine, cerebrospinal fluid, pleural fluid, synovial fluid, ocular fluid, peritoneal fluid, amniotic fluid, gastric fluid, lymph fluid, interstitial fluid, tissue homogenate, cell extracts, saliva, sputum, stool, physiological secretions, tears, mucus, sweat, milk, semen, seminal fluid, vaginal secretions, fluid from ulcers and other surface eruptions, blisters, and abscesses, and extracts of tissues associated with medical implants, and extracts of tissues including biopsies of normal, malignant, and suspect tissues or any other constituents of the body which may contain the microorganism of interest. In some embodiments, the sample is a human oral microbiome sample. In some embodiments, the sample is a whole organism.

[0225] In some embodiments, the sample is obtained from a patient diagnosed with, or suspected to be suffering from an infection, disease, or disorder. In some embodiments, the patient has been diagnosed with, or is suspected to be suffering from a bacterial, viral, fungal, or parasitic infection. In some embodiments, the infection includes, but is not limited to, tetanus, diphtheria, pertussis, pneumonia, meningitis, campylobacteriosis, mumps, measles, rubella, polio, flu, hepatitis, chickenpox, malaria, toxoplasmosis, giardiasis, or leishmaniasis.

[0226] In some embodiments, the patient has been diagnosed with, or is suspected to be suffering from an infection caused by a bacterium selected from the group consisting of: Mycobacterium, Streptococcus, Staphylococcus, Shigella, Campylobacter, Salmonella, Clostridium, Corynebacterium, Pseudomonas, Neisseria, Listeria, Vibrio, Bordetella, Helicobacter pylori, and Legionella.

[0227] In some embodiments, the patient has been diagnosed with, or is suspected to be suffering from an infection caused by a virus selected from the group consisting of: bacteriophage, RNA bacteriophage (e.g. MS2, AP205, PP7 and Qβ), Infectious Haematopoietic Necrosis Virus, Parvovirus, Herpes Simplex Virus, Hepatitis A virus, Hepatitis B virus, Hepatitis C virus, Measles virus, Mumps virus, Rubella virus, HIV, Influenza virus, Rhinovirus, Rotavirus A, Rotavirus B, Rotavirus C, Respiratory Syncytial Virus (RSV), Varicella zoster, and Poliovirus, Norovirus, Zika virus, Dengue Virus, Rabies Virus, Newcastle Disease Virus, and White Spot Syndrome Virus.

[0228] In some embodiments, the patient has been diagnosed with, or is suspected to be suffering from an infection caused by a parasite selected from the group consisting of: Plasmodium, Trypanosoma, Toxoplasma, Giardia, Leishmania, Cryptosporidium, helminthic parasites: Trichuris spp., Enterobius spp., Ascaris spp., Ancylostoma spp. and Necator spp., Strongyloides spp., Dracunculus spp., Onchocerca spp. and Wuchereria spp., Taenia spp., Echinococcus spp., and Diphyllobothrium spp., Fasciola spp., and Schistosoma spp.

### HiPR-Swap

[0229] Another aspect of the disclosure is directed to a method of analyzing a sample by performing multiple imaging rounds exchanging emissive readout probes which are referred to herein as HiPR-Swap.

[0230] HiPR-Swap is motivated by a need to target hundreds of thousands of rRNA, mRNA, and other molecules in the microbiomes and the host tissue in order to describe host-microbiome interactions. For example, to image on average 100 unique mRNAs in roughly 1000 taxa in the gut microbiome, along with all mammalian host transcripts would require us to be able to uniquely barcode ˜150,000 targets.

[0231] Several FISH-based methods use multiple rounds of imaging to achieve high multiplexity in their assays. Multiple rounds can be performed by: (1) photobleaching fluorescent probes before applying a next round of fluorescent probes; (2) applying DNAse to the specimen to degrade fluorescent probes before applying a next round of fluorescent probes; (3) adding photocleavable or chemically-cleavable linker molecules to the fluorescent probes, and performing the cleavage to remove fluorescence signal before applying a next round of fluorescent probes; (4) stripping probes using washes with high (>50%) formamide concentrations and/or low salt (≤2×SSC) and/or high temperatures (≥37° C.). These methods, however, are undesirable for a multitude of reasons, for example, they can be time consuming and have potential for photodamage. They can also be detrimental to sample integrity, are cost-prohibitive at scale, and possibly chemically incompatible. In addition, some can remove encoding probes necessary to conduct FISH-based methods. To overcome these deficiencies, the present disclosure uses DNA exchange as a method to quickly, specifically, carefully replace HiPR-FISH readout probes without disturbing encoding and/or amplifier probes. This method is referred to as HiPR-Swap.

[0232] High Phylogenetic Resolution microbiome mapping by Fluorescence in situ Hybridization (HiPR-FISH), is a versatile technology that uses binary encoding, spectral imaging, and machine learning based decoding to create micron-scale maps of the locations and identities of hundreds of microbial species in complex communities. See, for example, Shi, H. et al. “Highly multiplexed spatial mapping of microbial communities.” Nature vol. 588, 7839 (2020): 676-681 and PCT Patent Publication WO 2019/173555, filed Mar. 7, 2019. The contents of the aforementioned disclosures are each incorporated herein by reference in their entireties.

[0233] In the HiPR-Swap method, readout and encoding probes are designed such that the “landing pad” (the region on the encoding probe to which the readout probe binds) is shorter than or equal to in length to the readout probe. The landing pad being shorter than the readout probe creates a single-stranded overhang of the readout probe, as it extends past the end of the landing pad. The bigger the difference in length, the faster the exchange happens but there is also the risk of having a less stable readout probe being on the landing pad. Accordingly, there is a balance that needs to be struck to achieve a complete hybridization/exchange. In some instances, when the readout probe is of the same length as the landing pad, using a high concentration of exchange probes can result in a complete swap.

[0234] After a readout probe is bound, an exchange probe can be added to the specimen. The exchange probe can be constructed to be of equal length and a perfect reverse complement to the readout probe. In some instances, the exchange probe may contain locked nucleic acids to increase the stability of the exchange-readout pair. When added, the exchange probe seeds a hybridization to the exposed area of the readout probe. Over a short period of time the exchange probe completely hybridizes to the readout probe, thereby removing it from the encoding probe where it can be washed away. Importantly, orthogonal readout and exchange probes can be added simultaneously to reduce assay time.

[0235] Accordingly, a method for analyzing a sample can include:
[0236] contacting at least one encoding probe with the sample to produce a first complex, wherein each encoding probe comprises a targeting sequence, a first landing pad sequence, and a second landing pad sequence;
[0237] adding at least one first emissive readout probe to the first complex, wherein the first emissive readout probe comprises a label and a sequence complementary to the first landing pad sequence;
[0238] acquiring one or more emission spectra from the first emissive readout probe;
[0239] adding an exchange probe to the sample, wherein the exchange probe comprises a 100% complementary sequence to the first emissive readout probe sequence,
[0240] hybridizing the exchange probe to the first emissive readout probe to form a second complex;
[0241] removing the second complex from the sample,
[0242] adding at least one second emissive readout probe to the first complex, wherein the second emissive readout probe comprises a label and a sequence complementary to the second landing pad sequence;
[0243] acquiring one or more emission spectra from the second emissive readout probe;
[0244] repeating the aforementioned steps for at least one different encoding probe;
[0245] determining the spectra of “signal” (e.g., puncta, blobs) and assigning them to a species of interest; and
[0246] decoding the spectra into a single, targeted transcript through means of signal deconvolution, error correction, comparison to reference standards.

[0247] In some embodiments, more than one type of probe set (e.g., encoding probe, emissive readout probes, and exchange probes) may be introduced to a sample. For example, there may be from at least 2 to at least 1 billion distinguishable probe sets that are introduced to a sample. In some embodiments, at least 2, at least 5, at least 10, at least 25, at least 50, at least 75, at least 100, at least 300, at least 1,000, at least 3,000, at least 10,000, at least 30,000, at least 100,000, at least 500,000, or at least 1,000,000, at least 10,000,000, at least 50,000,000, at least 100,000,000, at least 500,000,000, or at least 1,000,000,000 distinguishable probe sets that are introduced to a sample. In some embodiments, the distinct probes are introduced simultaneously. In some embodiments, the distinct probes are introduced sequentially. In some embodiments, more than one type of probe set may be introduced to a sample over multiple rounds, with each round having multiple probe pools.

### Encoding Probe Hybridization

[0248] In the methods described herein for analyzing a sample, the method can include contacting at least one encoding probe with the sample to produce a first complex, wherein each encoding probe includes a targeting sequence, a first landing pad sequence, and a second landing pad sequence. This step may also be referred to as the “encoding probe hybridization” step. In here, at least one encoding probe is contacted with the sample to produce a first complex. The first complex can include the targeting sequence of the encoding probe hybridized to the nucleic acid target sequence.

[0249] In some embodiments, contacting the encoding probes with the sample is contacting the encoding probes with at least one nucleotide sequence of the sample. In some embodiments, contacting the encoding probes with the sample is hybridizing the encoding probe (e.g., via the targeting sequence present in the encoding probe) with a target sequence present in the sample.

[0250] In some embodiments, in order to contact encoding probes with the sample, the sample can be digested or lysed so as to allow the encoding probes (and other probes described herein) to contact with the target sequence.

[0251] In some embodiments, to contact the at least one encoding probe with the sample to produce a first complex, encoding buffer is added to the sample. In some embodiments, a pre-hybridization step can be performed prior to adding the encoding probe. In some embodiments, the encoding buffer can be added to the sample without the encoding probe. In some embodiments, the encoding buffer can be added to the sample about 30 minutes prior to adding the encoding probe.

[0252] In some embodiments, the encoding buffer can include a denaturing/deionizing agent, a salt buffer, a detergent, a polyanionic polymer, a blocking agent, acids, or combinations thereof. In some embodiments, the encoding buffer can include more than one type of agent, for example, the encoding buffer can include two or more polyanionic polymers and/or two or more blocking agents. In some embodiments, the encoding buffer can include a denaturing/deionizing agent, a salt buffer, a detergent, two polyanionic polymers, two blocking agents, and an acid.

[0253] In some embodiments, the encoding buffer can include a denaturing/deionizing agent. In some embodiments, the denaturing/deionizing agent can be formamide, ethylene carbonate, or urea. In some embodiments, the encoding buffer can include about 10% (v/v) to about 50% (v/v), about 15% (v/v) to about 45% (v/v), about 20% (v/v) to about 40% (v/v), about 25% (v/v) to about 35% (v/v), about 10% (v/v), 15% (v/v), 20% (v/v), 25% (v/v), or 30% (v/v) of a denaturing/deionizing agent (e.g., ethylene carbonate).

[0254] In some embodiments, the encoding buffer can include a salt buffer. In some embodiments, the salt buffer is saline sodium citrate (SSC), NaCl, or MgCl₂. In some embodiments, the encoding buffer can include about 2× to about 20×, about 5× to about 10×, or about 5× of a salt buffer (e.g., saline sodium citrate (SSC)).

[0255] In some embodiments, the encoding buffer can include at least one polyanionic polymer. In some embodiments, the encoding buffer can include one polyanionic polymer. In some embodiments, the encoding buffer can include two polyanionic polymers. In some embodiments, the polyanionic polymer can be dextran sulfate, heparin, or polyglutamic acid. In some embodiments, the encoding buffer can include about 2.5% (v/v) to about 25% (v/v), about 5% (v/v) to about 15% (v/v), about 7.5% (v/v) to about 12.5% (v/v), about 5% (v/v), or about 10% (v/v) of a polyanionic polymer (e.g., dextran sulfate). In some embodiments, the encoding buffer can include about 20 μg/mL to about 80 μg/mL, about 30 μg/mL to about 70 μg/mL, about 40 μg/mL to about 60 μg/mL, or about 50 μg/mL of a polyanionic polymer (e.g., heparin).

[0256] In some embodiments, the encoding buffer can include a detergent. In some embodiments, the detergent can be Tween 20, Tween 80, sodium dodecyl sulfate (SDS), Triton X-100, Triton X-114, NP-40, Brij-35, Brij-58. N-Dodecyl-beta-maltoside, Octyl-beta-glucoside, octylthioglucoside (OTG). In some embodiments, the encoding buffer can include about 0.01% (v/v) to about 1.0% (v/v), about 0.05% (v/v) to about 0.5% (v/v), or about 0.1% (v/v), or about 0.05% (v/v) of detergent (e.g., SDS).

[0257] In some embodiments, the encoding buffer can include an acid. In these embodiments, the acid lowers the pH of the buffer. In some embodiments, the acid can be citric acid. In some embodiments, the encoding buffer can include about 1 mM to about 30 mM, about 5 mM to about 15 mM, about 5 mM to about 10 mM, about 7 mM to about 10 mM, or about 9 mM of an acid (e.g., citric acid).

[0258] In some embodiments, the encoding buffer can include at least one blocking agent. In some embodiments, the encoding buffer can include one blocking agent. In some embodiments, the blocking agents can be Denhardt's solution, bovine serum albumin (BSA), salmon sperm DNA, Ficoll, polyvinyl pyrrolidone (PVP), E. coli tRNA, casein solution, or random hexamers. In some embodiments, the encoding buffer can include about 0.1× to about 10×, about 0.5× to about 5×, about 1× to about 2×, or about 1× of a blocking agent (e.g., Denhardt's solution).

[0259] In some embodiments, the encoding buffer can include ethylene carbonate, dextran sulfate, SSC, Denhardt's solution, and SDS. In some embodiments, the encoding buffer can include 10% ethylene carbonate, 10% dextran sulfate, 2×SSC, 5×Denhardt's solution, and 0.01% SDS.

### First Emissive Readout Probe Hybridization

[0260] Following the hybridization of the encoding probe with the target sequence to form a first complex, at least one first emissive readout probe is added to the first complex, wherein the first emissive readout probe comprises a label and a sequence complementary to the first landing pad sequence. In some embodiments, this step may be referred to as the “readout probe hybridization” step. In here, the emissive readout probes hybridize to their complementary sequences present in the first complex (e.g., first landing pad sequence).

[0261] In some embodiments, the encoding probe and the readout probe hybridization occur in the same step. In some embodiments, the readout probe hybridization is performed in the presence of the encoding buffer described above. In some embodiments, the encoding probe hybridization step, the readout probe hybridization step, and the readout step can occur sequentially or substantially in the same step.

[0262] In some embodiments, to hybridize the readout probes to the first complex, readout buffer is added to the sample. In some embodiments, to image the readout probes, a wash buffer is added to the sample.

[0263] In some embodiments, the wash buffer can include a salt buffer, a pH stabilizer, and a chelating agent.

[0264] In some embodiments, the readout probes are added so they achieve a final concentration of about 10 nM to about 20 μM, or about 10 nM to about 10 μM, or about 100 nM to about 1 μM, about 200 nM to about 500 nM, or about 200 nM, about 300 nM, about 400 nM, or about 500 nM for each readout probe. In some embodiments, the readout probes are added so they achieve a final concentration of about 400 nM.

[0265] In some embodiments, the wash buffer can include a salt buffer. In some embodiments, the salt buffer is saline sodium citrate (SSC), NaCl, or MgCl₂. In some embodiments, the wash buffer can include about 2× to about 20×, about 5× to about 10×, or about 5× of a salt buffer (e.g., saline sodium citrate (SSC)). In some embodiments, the wash buffer can include about 50 mM to about 500 mM, or about 100 mM to about 300 mM, or about 150 mM to about 250 mM, or about 215 mM or salt buffer (e.g., NaCl).

[0266] In some embodiments, the wash buffer can include a pH stabilizer. In some embodiments, the pH stabilizer can be at least one of tris-HCl, citric acid, SSC, 4-(2-hydroxyethyl)-1-piperazineethanesulfonic acid (HEPES), sucrose/EDTA/Tris-HCl (SET), potassium phosphate, tris(hydroxymethyl)methylamino]propanesulfonic acid (TAPS), NaOH, 3-(N-morpholino)propanesulfonic acid (MOPS), Tricine, Bicine, sodium pyrophosphate, piperazine-N,N′-bis(2-ethanesulfonic acid) (PIPES), SSPE. In some embodiments, the pH stabilizer can be tris-HCl. In some embodiments, the wash buffer can include about 5 mM to about 30 mM, about 10 mM to about 20 mM, about 10 mM, or about 20 mM of a pH stabilizer (e.g., tris-HCl).

[0267] In some embodiments, the wash buffer can include a chelating agent. In some embodiments, the chelating agent is at least one of EDTA, Ethylene glycol tetraacetic acid (EGTA), Salicylic acid, Triethanolamine (TEA), or Dimercaptopropanol. In some embodiments, the chelating agent is EDTA. In some embodiments, the wash buffer can include about 1 mM to about 10 mM, about 2 mM to about 5 mM, or about 5 mM of a chelating agent (e.g., EDTA).

[0268] In some embodiments, the wash buffer can include NaCl, tris-HCl, and EDTA. In some embodiments, the wash buffer can include 215 mM NaCl, 20 mM tris-HCl, and 5 mM EDTA.

### Exchange Probe Hybridization

[0269] After acquiring one or more emission spectra from the first emissive readout probe, an exchange probe is added so it removes the first emissive readout probe from the complex so it allows for another emissive readout probe and imaging step to occur. In some embodiments, the addition of the exchange probe and addition of the second emissive readout probe occur in the same step. In some embodiments, the addition of the exchange probe and addition of the second emissive readout probe occur sequentially.

[0270] In some embodiments, the exchange probes are added so they achieve a final concentration of about 10 nM to about 20 or about 10 nM to about 10 or about 100 nM to about 1 about 200 nM to about 500 nM, or about 200 nM, about 300 nM, about 400 nM, or about 500 nM for each exchange probe. In some embodiments, the exchange probes are added so they achieve a final concentration of about 400 nM.

[0271] In some embodiments, to contact the exchange probe with the first emissive readout probe to produce a second complex, exchange buffer is added to the sample. In some embodiments, the exchange buffer can include a denaturing/deionizing agent, a salt buffer, a detergent, a polyanionic polymer, a blocking agent, acids, or combinations thereof. In some embodiments, the exchange buffer can include more than one type of agent, for example, the encoding buffer can include two or more polyanionic polymers and/or two or more blocking agents. In some embodiments, the exchange buffer can include a denaturing/deionizing agent, a salt buffer, a detergent, two polyanionic polymers, two blocking agents, and an acid.

[0272] In some embodiments, the exchange buffer can include a denaturing/deionizing agent. In some embodiments, the denaturing/deionizing agent can be formamide, ethylene carbonate, or urea. In some embodiments, the exchange buffer can include about 10% (v/v) to about 50% (v/v), about 15% (v/v) to about 45% (v/v), about 20% (v/v) to about 40% (v/v), about 25% (v/v) to about 35% (v/v), about 10% (v/v), 15% (v/v), 20% (v/v), 25% (v/v), or 30% (v/v) of a denaturing/deionizing agent (e.g., ethylene carbonate).

[0273] In some embodiments, the exchange buffer can include a salt buffer. In some embodiments, the salt buffer is saline sodium citrate (SSC), NaCl, or MgCl₂. In some embodiments, the exchange buffer can include about 2× to about 20×, about 5× to about 10×, or about 5× of a salt buffer (e.g., saline sodium citrate (SSC)).

[0274] In some embodiments, the exchange buffer can include at least one polyanionic polymer. In some embodiments, the exchange buffer can include one polyanionic polymer. In some embodiments, the exchange buffer can include two polyanionic polymers. In some embodiments, the polyanionic polymer can be dextran sulfate, heparin, or polyglutamic acid. In some embodiments, the exchange buffer can include about 2.5% (v/v) to about 25% (v/v), about 5% (v/v) to about 15% (v/v), about 7.5% (v/v) to about 12.5% (v/v), about 5% (v/v), or about 10% (v/v) of a polyanionic polymer (e.g., dextran sulfate). In some embodiments, the exchange buffer can include about 20 μg/mL to about 80 μg/mL, about 30 μg/mL to about 70 μg/mL, about 40 μg/mL to about 60 μg/mL, or about 50 μg/mL of a polyanionic polymer (e.g., heparin).

[0275] In some embodiments, the exchange buffer can include a detergent. In some embodiments, the detergent can be Tween 20, Tween 80, sodium dodecyl sulfate (SDS), Triton X-100, Triton X-114, NP-40, Brij-35, Brij-58. N-Dodecyl-beta-maltoside, Octyl-beta-glucoside, octylthioglucoside (OTG). In some embodiments, the exchange buffer can include about 0.01% (v/v) to about 1.0% (v/v), about 0.05% (v/v) to about 0.5% (v/v), or about 0.1% (v/v), or about 0.05% (v/v) of detergent (e.g., SDS).

[0276] In some embodiments, the exchange buffer can include an acid. In these embodiments, the acid lowers the pH of the buffer. In some embodiments, the acid can be citric acid. In some embodiments, the exchange buffer can include about 1 mM to about 30 mM, about 5 mM to about 15 mM, about 5 mM to about 10 mM, about 7 mM to about 10 mM, or about 9 mM of an acid (e.g., citric acid).

[0277] In some embodiments, the exchange buffer can include at least one blocking agent. In some embodiments, the exchange buffer can include one blocking agent. In some embodiments, the blocking agents can be Denhardt's solution, bovine serum albumin (BSA), salmon sperm DNA, Ficoll, polyvinyl pyrrolidone (PVP), E. coli tRNA, casein solution, or random hexamers. In some embodiments, the exchange buffer can include about 0.1× to about 10×, about 0.5× to about 5×, about 1× to about 2×, or about 1× of a blocking agent (e.g., Denhardt's solution).

[0278] In some embodiments, the exchange buffer can include ethylene carbonate, dextran sulfate, SSC, Denhardt's solution, and SDS. In some embodiments, the exchange buffer can include 10% ethylene carbonate, 10% dextran sulfate, 2×SSC, 5×Denhardt's solution, and 0.01% SDS.

### Second Emissive Readout Probe Hybridization

[0279] Following the hybridization of the exchange probe to the first emissive readout probe, a second emissive readout probe is added. In some embodiments, this step may be referred to as the “second readout probe hybridization” step. In here, the second emissive readout probe hybridizes to its complementary sequences present in the first complex (e.g., second landing pad sequence).

[0280] In some embodiments, the second emissive readout probe hybridization is performed in the presence of the encoding buffer described above. In some embodiments, to image the second readout probes, a wash buffer is added to the sample. In some embodiments, the wash buffer is the wash buffer described above.

[0281] In some embodiments, the second emissive readout probes are added so they achieve a final concentration of about 10 nM to about 10 or about 100 nM to about 1 about 200 nM to about 500 nM, or about 200 nM, about 300 nM, about 400 nM, or about 500 nM for each readout probe. In some embodiments, the second emissive readout probes are added so they achieve a final concentration of about 400 nM.

[0282] In some embodiments, adding an exchange probe to the sample, hybridizing the exchange probe to the first emissive readout probe, and removing the second complex from the sample are performed in the same step. In some embodiments, adding an exchange probe to the sample, hybridizing the exchange probe to the first emissive readout probe, and removing the second complex from the sample are performed sequentially. In some embodiments, adding an exchange probe to the sample, hybridizing the exchange probe to the first emissive readout probe, removing the second complex from the sample, and adding the second emissive readout probe are performed in the same step. In some embodiments, adding an exchange probe to the sample, hybridizing the exchange probe to the first emissive readout probe, removing the second complex from the sample, and adding the second emissive readout probe are performed sequentially.

[0283] In some embodiments, hybridizing the exchange probe to the first or second emissive readout probe results in de-hybridization of the first or second emissive readout probe from the first or second landing pad sequence. In some embodiments, the step is achieved from about 30 seconds to about 1 hour. In some embodiments, the step is achieved within 30 seconds, 1 minute, 5 minutes, 10 minutes, 12 minutes, 15 minutes, 30 minutes, 45 minutes, or 1 hour. In some embodiments, the step is achieved within 1 hour. In some embodiments, the step is achieved overnight.

[0284] In another aspect, a method for analyzing a sample can include:
[0285] generating a set of probes, wherein each probe comprises:
[0286] (i) a targeting sequence;
[0287] (ii) a first landing pad sequence; and
[0288] (iii) a second landing pad sequence;
[0289] contacting the set of probes with the sample to permit hybridization of the probes to nucleotides present in the sample to produce a complex;
[0290] adding a first set of emissive readout probes to the complex, wherein each emissive readout probe comprises:
[0291] (i) a label, and
[0292] (ii) a sequence complementary to the first or second landing pad sequence;
[0293] acquiring one or more emission spectra from the first emissive readout probe;
[0294] adding a set of exchange probes to the sample, wherein each exchange probe comprises a 100% complementary sequence to the first emissive readout probe sequences,
[0295] hybridizing the exchange probes to the first emissive readout probes to form a second complex;
[0296] removing the second complex from the sample,
[0297] adding a second set of emissive readout probes to the complex, wherein each emissive readout probe comprises:
[0298] (i) a label, and
[0299] (ii) a sequence complementary to the first or second landing pad sequence;
[0300] acquiring one or more emission spectra from the second emissive readout probe;
[0301] determining the spectra of “signal” (e.g., puncta, blobs) and assigning them to a species of interest; and
[0302] decoding the spectra into a single, targeted transcript through means of signal deconvolution, error correction, comparison to reference standards.

[0303] Sample

[0304] In some embodiments, the sample is at least one of a cell, a cell suspension, a tissue biopsy, a tissue specimen, urine, stool, blood, serum, plasma, bone biopsies, bone marrow, respiratory specimens, sputum, induced sputum, tracheal aspirates, bronchoalveolar lavage fluid, sweat, saliva, tears, ocular fluid, cerebral spinal fluid, pericardial fluid, pleural fluid, peritoneal fluid, placenta, amnion, pus, nasal swabs, nasopharyngeal swabs, oropharyngeal swabs, ocular swabs, skin swabs, wound swabs, mucosal swabs, buccal swabs, vaginal swabs, vulvar swabs, nails, nail scrapings, hair follicles, corneal scrapings, gavage fluids, gargle fluids, abscess fluids, wastewater, or plant biopsies.

[0305] In some embodiments, the sample is a cell. In some embodiments, the cell is a bacterial cell. In some embodiments, the cell is a eukaryotic cell. In some embodiments the eukaryotic cell is a unicellular organism including protozoa, chromista, algae, or fungi. In some embodiments the eukaryotic cell is part of a multicellular organism from chromista, plantae, fungi, or animalia. In some embodiments the sample is a tissue composed of cells. In some embodiments the cell contains foreign DNA/RNA from viruses, plasmids, and bacteria.

[0306] In some embodiments, the sample can include a plurality of cells. In some embodiments, each cell in the plurality of cells can include a specific targeting sequence, which may or may not be the same from the other targeting sequences.

[0307] In some embodiments, the sample is a human oral microbiome sample. In some embodiments, the sample is a whole organism.

[0308] In some embodiments, the sample is obtained from a patient diagnosed with, or suspected to be suffering from an infection, disease, or disorder. In some embodiments, the patient has been diagnosed with, or is suspected to be suffering from a bacterial, viral, fungal, or parasitic infection. In some embodiments, the infection includes, but is not limited to, Acute Flaccid Myelitis, Anaplasmosis, Anthrax, Babesiosis, Botulism, Brucellosis, Campylobacteriosis, Carbapenem-resistant Infection (CRE/CRPA), Chancroid, Chickenpox, Chikungunya Virus Infection (Chikungunya), Chlamydia, Ciguatera (Harmful Algae Blooms (HABs)), Clostridium Difficile Infection, Clostridium Perfringens (Epsilon Toxin), Coccidioidomycosis fungal infection (Valley fever), COVID-19 (Coronavirus Disease 2019), Creutzfeldt-Jacob Disease, transmissible spongiform encephalopathy (CJD), Cryptosporidiosis (Crypto), Cyclosporiasis, Dengue, 1, 2, 3, 4 (Dengue Fever), Diphtheria, E. coli infection, Shiga toxin-producing (STEC), Eastern Equine Encephalitis (EEE), Ebola Hemorrhagic Fever (Ebola), Ehrlichiosis, Encephalitis, Arboviral or parainfectious, Enterovirus Infection, D68 (EV-D68), Enterovirus Infection, Non-Polio (Non-Polio Enterovirus), Giardiasis (Giardia), Glanders, Gonococcal Infection (Gonorrhea), Granuloma inguinale, Haemophilus Influenza disease, Type B (Hib or H-flu), Hantavirus Pulmonary Syndrome (HPS), Hemolytic Uremic Syndrome (HUS), Hepatitis (A, B, C, D, and/or E), Herpes Herpes Zoster, zoster VZV (Shingles), Histoplasmosis infection (Histoplasmosis), Human Immunodeficiency Virus/AIDS (HIV/AIDS), Human Papillomavirus (HPV), Influenza (Flu), Lead Poisoning, Legionellosis (Legionnaires Disease), Leishmaniasis, Leprosy (Hansens Disease), Leptospirosis, Listeriosis (Listeria), Lyme Disease, Lymphogranuloma venereum infection (LGV), Malaria, Measles, Melioidosis, Meningitis, Viral (Meningitis, viral), Meningococcal Disease, Bacterial (Meningitis, bacterial), Middle East Respiratory Syndrome Coronavirus (MERS-CoV), Mononucleosis, Multisystem Inflammatory Syndrome in Children (MIS-C), Mumps, Norovirus, Paralytic Shellfish Poisoning (Paralytic Shellfish Poisoning, Ciguatera), Pediculosis (Lice, Head and Body Lice), Pelvic Inflammatory Disease (PID), Pertussis (Whooping Cough), Plague; Bubonic, Septicemic, Pneumonic (Plague), Pneumococcal Disease (Pneumonia), Poliomyelitis (Polio), Powassan, Psittacosis (Parrot Fever), Phthiriasis (Crabs; Pubic Lice Infestation), Pustular Rash diseases (Small pox, monkeypox, cowpox), Q-Fever, Rabies, Ricin Poisoning, Rickettsiosis (Rocky Mountain Spotted Fever), Rubella, Salmonellosis gastroenteritis (Salmonella), Scabies Infestation (Scabies), Scombroid, Septic Shock (Sepsis), Severe Acute Respiratory Syndrome (SARS), Shigellosis gastroenteritis (Shigella), Smallpox, Staphylococcal Infection, Methicillin-resistant (MRSA), Staphylococcal Food Poisoning, Enterotoxin-B Poisoning (Staph Food Poisoning), Staphylococcal Infection, Vancomycin Intermediate (VISA), Staphylococcal Infection, Vancomycin Resistant (VRSA), Streptococcal Disease, Group A (invasive) (Strep A (invasive)), Streptococcal Disease, Group B (Strep-B), Streptococcal Toxic-Shock Syndrome, STSS, Toxic Shock (STSS, TSS), Syphilis, primary, secondary, early latent, late latent, congenital, Tetanus, Toxoplasmosis, Trichomoniasis (Trichomonas infection), Trichinosis Infection (Trichinosis), Tuberculosis (Latent) (LTBI), Tuberculosis (TB), Tularemia (Rabbit fever), Typhus, Typhoid Fever, Group D, Vaginosis, bacterial (Yeast Infection), Vaping-Associated Lung Injury (e-Cigarette Associated Lung Injury), Varicella (Chickenpox), Vibrio cholerae (Cholera), Vibriosis (Vibrio), Viral Hemorrhagic Fever (Ebola, Lassa, Marburg), West Nile Virus, Yellow Fever, Yersenia (Yersinia), or Zika Virus Infection (Zika).

[0309] In some embodiments, when the sample is obtained from a patient, the patient has been diagnosed with, or is suspected to be suffering from an infection caused by a bacterium selected from the group consisting of: Acinetobacter, Actinomyces, Aerococcus, Bacteroides, Bartonella, Brucella, Bordetella, Burkholderia, Campylobacter, Chlamydia, Citrobacter, Clostridium, Corynebacterium, Edwardsiella, Elizabethkingia, Enterobacter, Enterococcus, Escherichia, Fusobacterium, Haemophilus, Helicobacter, Klebsiella, Legionella, Leptospira, Listeria, Morganella, Mycobacterium, Mycoplasma, Neisseria, Pantoea, Prevotella, Proteus, Providencia, Pseudomonas, Raoultella, Salmonella, Serratia, Shigella, Staphylococcus, Stenotrophomonas, Streptococcus, Ureaplasma, and Vibrio.

[0310] In some embodiments, when the sample is obtained from a patient, the patient has been diagnosed with, or is suspected to be suffering from an infection caused by a virus selected from the group consisting of: bacteriophage, RNA bacteriophage (e.g., MS2, AP205, PP7 and Qβ), Infectious Haematopoietic Necrosis Virus, Parvovirus, Herpes Simplex Virus, Hepatitis A virus, Hepatitis B virus, Hepatitis C virus, Measles virus, Mumps virus, Rubella virus, HIV, Influenza virus, Rhinovirus, Rotavirus A, Rotavirus B, Rotavirus C, Respiratory Syncytial Virus (RSV), Varicella zoster, and Poliovirus, Norovirus, Zika virus, Dengue Virus, Rabies Virus, Newcastle Disease Virus, and White Spot Syndrome Virus.

[0311] In some embodiments, when the sample is obtained from a patient, the patient has been diagnosed with, or is suspected to be suffering from an infection caused by a parasite selected from the group consisting of: Plasmodium, Trypanosoma, Toxoplasma, Giardia, Leishmania, Cryptosporidium, helminthic parasites: Trichuris spp., Enterobius spp., Ascaris spp., Ancylostoma spp. and Necator spp., Strongyloides spp., Dracunculus spp., Onchocerca spp. and Wuchereria spp., Taenia spp., Echinococcus spp., and Diphyllobothrium spp., Fasciola spp., and Schistosoma spp.

[0312] Encoding Probes

[0313] Encoding probes are probes that bind directly to a target or targeting sequence and contain either 1 or 2 branches extending away from the hybridization site. The branches can either correspond to the readout sequences or first or second landing pad sequences. Encoding probes, for example, are designed to target bacterial ribosomal RNA (rRNA) and messenger RNA (mRNA) targets.

[0314] For example, rRNA-probes can contain (5′ to 3′):

[0315] a. Primer sequences to enrich probe pool.

[0316] b. A first landing pad sequence.

[0317] c. rRNA target complementary sequence.

[0318] d. A second landing pad sequence (different than b).

[0319] e. Primer sequences to enrich probe pool.

[0320] mRNA-probes contain (5′ to 3′):

[0321] a. Primer sequences to enrich probe pool.

[0322] b. A first landing pad sequence.

[0323] c. mRNA target complementary sequence.

[0324] d. A second landing pad sequence (different than b).

[0325] e. Primer sequences to enrich probe pool.

[0326] In some embodiments, each encoding probe can include a targeting sequence, a first landing pad sequence and a second landing pad sequence.

[0327] Primer Sequences

[0328] In some embodiments, the primer sequence can include about 10 to about 30, about 15 to about 25, about 18 to about 23, about 15, 16, 17, 18, 19, 20, 21, 22, or 23 nucleotides long.

[0329] Targeting Sequence

[0330] In some embodiments, the targeting sequence targets at least one of messenger RNA (mRNA), micro RNA (miRNA), long non coding RNA (lncRNA), ribosomal RNA (rRNA), small interfering RNA (siRNA), transfer RNA (tRNA), Crispr RNA (crRNA), trans-activating cirspr RNA (tracrRNA), mitochondria RNA, Intronic RNA, viral mRNA, viral genomic RNA, environmental RNA, double-stranded RNA (dsRNA), small nuclear RNA (snRNA), small nucleolar (snoRNA), piwi-interacting RNA (piRNA), genomic DNA, synthetic DNA, DNA, plasmid DNA, a plasmid, viral DNA, retroviral DNA, environmental DNA, extracellular DNA, a protein, a small molecule, or an antigenic target. In some embodiments, the target is mRNA. In some embodiments, the target is rRNA. In some embodiments, the target is mRNA and rRNA.

[0331] In some embodiments, the targeting sequence of the encoding probe is substantially complementary to a specific target sequence. By “substantially complementary” it is meant that the nucleic acid fragment is capable of hybridizing to at least one nucleic acid strand or duplex even if less than all nucleobases do not base pair with a counterpart nucleobase. In some embodiments, a “substantially complementary” nucleic add contains at least one sequence in which about 70%, about 71%, about 72%, about 73%, about 74%, about 75%, about 76%, about 77%, about 77%, 8%, about 79%, about 80%, about 81%, about 82%, about 83%, about 84%, about 85%, about 86%, about 87%, about 88%, about 89%, about 90%, about 91%, about 92%, about 93%, about 94%, about 95%, about 96%, about 97%, about 98%, about 99%, to about 100%, and any range therein, of the nucleobase sequence is capable of basepairing with at least one single or double stranded nucleic acid molecule during hybridization.

[0332] In some embodiments, the targeting sequence is designed to have a predicted melting temperature of between about 55° C. and about 65° C. In some embodiments, the predicted melting temperature of the targeting sequence is 55° C., 56° C., 57° C., 58° C., 59° C., 60° C., 61° C., 62° C., 63° C., 64° C. or 65° C. In some embodiments, the targeting sequence can have a GC content of about 55%, 60%, 65% or 70%.

[0333] In some embodiments, the targeting sequence can include about 10 to about 35, about 15 to about 30, about 18 to about 30, about 15, 16, 17, 18, 19, 20, 21, 22, 23, 24, or 25 nucleotides long.

[0334] In some embodiments, the targeting sequence of an encoding probe is designed using publicly-available sequence data. In some embodiments, the targeting sequence of an encoding probe design is designed using custom catalogues of the target/sample. In some embodiments, the targeting sequence of an encoding probe is designed using a database that is relevant for a system. In a specific embodiment, the system is the gut microbiome. In some embodiments, the targeting sequence of an encoding probe is designed using a database that is relevant for a disease or infection.

[0335] Landing Pad Sequences

[0336] In some embodiments, the encoding probe can include a first landing pad sequence on the 5′ end and a second landing pad sequence on the 3′ end. In some embodiments, the first and second landing pad sequences have the same sequence.

[0337] In some embodiments, each landing pad sequence is about 10 to about 50, about 15 to about 50, about 15 to about 40, about 10 to about 30, about 15 to about 25, about 18 to about 23, about 15, 16, 17, 18, 19, 20, 21, 22, or 23 nucleotides long. In some embodiments, each landing pad sequence is substantially complementary to the first and/or second emissive readout sequences.

[0338] The encoding probes, and other probes described herein, may be introduced into the sample (e.g., cell) using any suitable method. In some cases, the sample may be sufficiently permeabilized such that the probes may be introduced into the sample by flowing a fluid containing the probes around the sample (e.g., cells). In some cases, the samples (e.g., cells) may be sufficiently permeabilized as part of a fixation process. In some embodiments, samples (e.g., cells) may be permeabilized by exposure to certain chemicals such as ethanol, methanol, Triton, or the like. In some embodiments, techniques such as electroporation or microinjection may be used to introduce the probes into a sample (e.g., cell).

[0339] Emissive Readout Probes

[0340] Emissive readouts probes are oligonucleotides bound with one of ten fluorescent dyes at the 5′- and/or 3′-end. In some embodiments, each emissive readout probe comprises a label and a sequence complementary to the first landing pad sequence.

[0341] In some embodiments, each emissive readout probe sequence is of the same length as the first or second landing pad sequence. In some embodiments, the emissive readout probe sequence is 0 nucleotides longer than the corresponding landing pad sequence.

[0342] In some embodiments, each emissive readout probe sequence is from at least 1 to at least 35 nucleotides longer than the corresponding landing pad sequence. In some embodiments, each emissive readout probe sequence is at least 1, 2, 3, 4, 5, 6, 7, 8, 9, 10, 15, 20, 25, 30, or 35 nucleotides longer than the corresponding landing pad sequence. In some embodiments, each emissive readout probe sequence is at least 1, 2, 3, 4, 5, 6, 7, 8, 9, or 10 nucleotides longer than the corresponding landing pad sequence. In some embodiments, each emissive readout probe sequence is at least 5 nucleotides longer than the corresponding landing pad sequence.

[0343] Readout probes can be designed as follows:

[0344] a. Are coupled to 1, 2, or more fluorescent dyes.

[0345] b. Are orthogonal to all biological sequences.

[0346] c. Are orthogonal to each other/each other's complementary sequences.

[0347] In some embodiments, the readout sequence is about 10 to about 50, about 15 to about 50, about 15 to about 45, about 15 to about 35, about 15 to about 30, about 18 to about 24, about 10, 11, 12, 13, 14, 15, 16, 17, 18, 19, 20, 21, 22, 23, or 24 nucleotides long.

[0348] In some embodiments, the emissive readout probe can include a label on the 5′ or 3′ end. In some embodiments, the emissive readout probe can include a label on the 5′ end and a label on the 3′ end. In some embodiments, the labels are the same. In some embodiments, the labels are different.

[0349] In some embodiments, the label is a fluorescent entity (fluorophore) or phosphorescent entity. In some embodiments, the label is a cyanine dye (e.g., Cy2, Cy3, Cy3B, Cy5, Cy5.5, Cy7, etc.), Alexa Fluor dye, Atto dye, photo switchable dye, photoactivatable dye, fluorescent dye, metal nanoparticle, semiconductor nanoparticle or “quantum dots”, fluorescent protein such as GFP (Green Fluorescent Protein), or photoactivatable fluorescent protein, such as PAGFP, PSCFP, PSCFP2, Dendra, Dendra2, EosFP, tdEos, mEos2, mEos3, PAmCherry, PAtagRFP, mMaple, mMaple2, and mMaple3.

[0350] In some embodiments, the label is Alexa Fluor 350, Alexa Fluor 405, Alexa Fluor 430, Alexa Fluor 488, Alexa Fluor 514, Alexa Fluor 532, Alexa Fluor 546, Alexa Fluor 555, Alexa Fluor 561, Alexa Fluor 568, Alexa Fluor 594, Alexa Fluor 610, Alexa Fluor 633, Alexa Fluor 635, Alexa Fluor 647, Alexa Fluor 647-R-phycoerythrin, Alexa Fluor 660, Alexa Fluor 680, Alexa Fluor 680-allophycocyanin, Alexa Fluor 700, Alexa Fluor 750, Alexa Fluor 790, Alexa Fluor Plus 405, Alexa Fluor Plus 488, Alexa Fluor Plus 555, Alexa Fluor Plus 594, Alexa Fluor Plus 647, Alexa Fluor Plus 680, Alexa Fluor Plus 750, Alexa Fluor Plus 800, Pacific Blue, Pacific Green, Rhodamine Red X, DyLight 485-LS, DyLight-510-LS, DyLight 515-LS, DyLight 521-LS, Hydroxycoumarin, methoxycoumarin, Cy2, FAM, Fluorescein FITC, R-phycoerythrin (PE), Tamara, Cy3.5 581, ROX (carboxy-X-rhodamine), Red 613, Texas Red, Cy5, Cy5.5, Cy7, Allophycocyanin, ATTO 430LS, ATTO 490LS, ATTO 390, ATTO 425, Cyan 500 NHS-Ester, ATTO 465, ATTO 488, ATTO 495, ATTO Rho110, ATTO 514, ATTO 520, ATTO 532, ATTO Rho6G, ATTO 542, ATTO 550, ATTO 565, ATTO Rho3B, ATTO Rho11, ATTO Rho12, ATTO Thio12, ATTO Rho101, ATTO 590, ATTO 594, ATTO Rho13, ATTO 610, ATTO 620, ATTO Rho14, ATTO 633, ATTO 643, ATTO 647, ATTO 647N, ATTO 655, ATTO Oxa12, ATTO 665, ATTO 680, ATTO 700, ATTO 725, ATTO 740.

[0351] In some embodiments, the label is imaged using widefield microscopy, point scanning confocal microscopy, spinning disk confocal microscopy, lattice lightsheet microscopy, or light field microscopy.

[0352] In some embodiments, the detection strategy used is channel, spectral, channel and fluorescence lifetime, or spectral and fluorescence lifetime.

[0353] In some embodiments, the labels used in the present methods are imaged using a microscope. In some embodiments, the microscope is a confocal microscope. In some embodiments, the microscope is a fluorescence microscope. In some embodiments, the microscope is a light-sheet microscope. In some embodiments, the microscope is a super-resolution microscope.

[0354] In some embodiments, the sample is on an analyzing platform, wherein the analyzing platform is a microscope slide, at least one chamber, at least one microfluidic device, at least one well, at least one plate, or at least one filter membrane.

[0355] Exchange Probes

[0356] Exchange probes are each about 10-50 or 15-50 nucleotide-long oligonucleotides. In some embodiments, each exchange probe comprises a 100% complementary sequence to a respective emissive readout probe sequence.

[0357] In some embodiments, the exchange sequence is about 10 to about 50, about 15 to about 50, about 15 to about 45, about 15 to about 35, about 15 to about 30, about 18 to about 24, about 10, 11, 12, 13, 14, 15, 16, 17, 18, 19, 20, 21, 22, 23, or 24 nucleotides long.

[0358] In some embodiments, the encoding probes contain locked nucleic acids to stabilize the exchange reaction.

[0359] In some embodiments, adding an exchange probe to the sample, hybridizing the exchange probe to the first emissive readout probe, and removing the second complex from the sample are performed in the same step. In some embodiments, adding an exchange probe to the sample, hybridizing the exchange probe to the first emissive readout probe, and removing the second complex from the sample are performed sequentially. In some embodiments, adding an exchange probe to the sample, hybridizing the exchange probe to the first emissive readout probe, removing the second complex from the sample, and adding the second emissive readout probe are performed in the same step. In some embodiments, adding an exchange probe to the sample, hybridizing the exchange probe to the first emissive readout probe, removing the second complex from the sample, and adding the second emissive readout probe are performed sequentially.

[0360] In some embodiments, hybridizing the exchange probe to the first or second emissive readout probe results in de-hybridization of the first or second emissive readout probe from the first or second landing pad sequence. In some embodiments, the step is achieved from about 30 seconds to about 1 hour. In some embodiments, the step is achieved within 30 seconds, 1 minute, 5 minutes, 10 minutes, 12 minutes, 15 minutes, 30 minutes, 45 minutes, or 1 hour. In some embodiments, the step is achieved within 1 hour. In some embodiments, the step is achieved overnight.

[0361] In another aspect, a method for analyzing a bacterial sample can include:
[0362] contacting at least one encoding probe with the sample to produce a first complex, wherein each encoding probe comprises a targeting sequence, a first landing pad sequence, and a second landing pad sequence;
[0363] adding at least one first emissive readout probe to the first complex, wherein the first emissive readout probe comprises a label and a sequence complementary to the first landing pad sequence;
[0364] detecting the first emissive readout probe with a confocal microscope;
[0365] adding an exchange probe to the sample, wherein the exchange probe comprises a 100% complementary sequence to the first emissive readout probe sequence,
[0366] hybridizing the exchange probe to the first emissive readout probe to form a second complex;
[0367] removing the second complex from the sample,
[0368] adding at least one second emissive readout probe to the first complex, wherein the second emissive readout probe comprises a label and a sequence complementary to the second landing pad sequence;
[0369] detecting the second emissive readout probe with a confocal microscope;
[0370] repeating the aforementioned steps for at least one different encoding probe;
[0371] determining the spectra of “signal” (e.g., puncta, blobs) and assigning them to a bacterium; and
[0372] decoding the spectra into a single, targeted transcript through means of signal deconvolution, error correction, comparison to reference standards.

[0373] In another aspect, a method for analyzing a bacterial sample, comprising:
[0374] generating a set of probes, wherein each probe comprises:
[0375] (i) a targeting sequence;
[0376] (ii) a first landing pad sequence; and
[0377] (iii) a second landing pad sequence;
[0378] contacting the set of probes with the sample to permit hybridization of the probes to nucleotides present in the sample to produce a complex;
[0379] adding a first set of emissive readout probes to the complex, wherein each emissive readout probe comprises:
[0380] (i) a label, and
[0381] (ii) a sequence complementary to the first or second landing pad sequence;
[0382] detecting the first set of emissive readout probes in the sample with a confocal microscope;
[0383] adding a set of exchange probes to the sample, wherein each exchange probe comprises a 100% complementary sequence to the first emissive readout probe sequences,
[0384] hybridizing the exchange probes to the first emissive readout probes to form a second complex;
[0385] removing the second complex from the sample,
[0386] adding a second set of emissive readout probes to the complex, wherein each emissive readout probe comprises:
[0387] (i) a label, and
[0388] (ii) a sequence complementary to the first or second landing pad sequence;
[0389] detecting the second set of emissive readout probes in the sample with a confocal microscope;
[0390] determining the spectra of “signal” (e.g., puncta, blobs) and assigning them to a bacterium; and
[0391] decoding the spectra into a single, targeted transcript through means of signal deconvolution, error correction, comparison to reference standards.

[0392] Constructs and Libraries

[0393] In another aspect, a construct can include:
[0394] a targeting sequence that is a region of interest on a nucleotide;
[0395] a first landing pad sequence;
[0396] a second landing pad sequence, wherein the second landing pad sequence is different from the first landing pad sequence;
[0397] a first emissive readout probe comprising a first label and a sequence complimentary to the first landing pad sequence;
[0398] an exchange probe comprising a 100% complementary sequence to the first emissive readout probe sequences; and
[0399] a second emissive readout probe comprising a second label and a sequence complimentary to the second landing pad sequence.

[0400] In another aspect, a library of constructs comprising a plurality of barcoded probes, wherein each barcoded probe can include:
[0401] a targeting sequence that is a region of interest on a nucleotide;
[0402] a first landing pad sequence;
[0403] a second landing pad sequence, wherein the second landing pad sequence is different from the first landing pad sequence;
[0404] a first emissive readout probe comprising a first label and a sequence complimentary to the first landing pad sequence;
[0405] an exchange probe comprising a 100% complementary sequence to the first emissive readout probe sequences; and
[0406] a second emissive readout probe comprising a second label and a sequence complimentary to the second landing pad sequence.

[0407] In some embodiments, the region of interest on a nucleotide is at least one of messenger RNA (mRNA), microRNA (miRNA), long non coding RNA (lncRNA), ribosomal RNA (rRNA), small interfering RNA (siRNA), transfer RNA (tRNA), Crispr RNA (crRNA), trans-activating CRISPR RNA (tracrRNA), mitochondrial RNA, intronic RNA, viral mRNA, viral genomic RNA, environmental RNA, double-stranded RNA (dsRNA), small nuclear RNA (snRNA), small nucleolar (snoRNA), PIWI-interacting RNA (piRNA), genomic DNA, synthetic DNA, DNA, plasmid DNA, a plasmid, viral DNA, retroviral DNA, environmental DNA, extracellular DNA, a protein, a small molecule, or an antigen.

[0408] In some embodiments, the region of interest on a nucleotide is mRNA.

[0409] In some embodiments, the region of interest on a nucleotide is rRNA.

[0410] In some embodiments, the region of interest on a nucleotide is mRNA and rRNA.

[0411] In some embodiments, the first and second landing pad sequences have the same sequence. In some embodiments, the first and second landing pad sequences have different sequences.

[0412] In some embodiments, the first and second landing pad sequences each are about 10 to about 50, about 10 to about 40, about 10 to about 30, about 15 to about 25, about 18 to about 23, about 15, 16, 17, 18, 19, 20, 21, 22, or 23 nucleotides long. In some embodiments, the first and second landing pad sequences each are substantially complementary to the first and/or second emissive readout sequences.

[0413] In some embodiments, the first and second emissive readout probes are each about 10 to about 50, about 10 to about 40, about 10 to about 30, about 15 to about 25, about 18 to about 23, about 15, 16, 17, 18, 19, 20, 21, 22, or 23 nucleotides long bound with one of ten fluorescent dyes at the 5′- and/or 3′-end. In some embodiments, the first and second emissive readout probes each comprise a label and a sequence complementary to the first or second landing pad sequence.

[0414] In some embodiments, the first and second emissive readout probes are each of the same length as the corresponding landing pad sequence. In some embodiments, the first and second emissive readout probes are each 0 nucleotides longer than the corresponding landing pad sequence. In some embodiments, the first and second emissive readout probes are each at least 2 to 50 nucleotides longer than the corresponding landing pad sequence. In some embodiments, the first and second emissive readout probes are each at least 1, 2, 3, 4, 5, 6, 7, 8, 9, 10, 15, 20, 25, 30, 35, 40, 45, or 50 nucleotides longer than the corresponding landing pad sequence. In some embodiments, the first and second emissive readout probes are each at least 1, 2, 3, 4, or 5 nucleotides longer than the corresponding landing pad sequence. In some embodiments, the first and second emissive readout probes are each at least 5 nucleotides longer than the corresponding landing pad sequence.

[0415] In some embodiments, the readout sequence of the first and second emissive readout probes are each about 15 to about 50, about 15 to about 45, about 15 to about 35, about 15 to about 30, about 18 to about 24, about 15, 16, 17, 18, 19, 20, 21, 22, 23, or 24 nucleotides long.

[0416] In some embodiments, the emissive readout probe can include a label on the 5′ or 3′ end. In some embodiments, the emissive readout probe can include a label on the 5′ end and a label on the 3′ end. In some embodiments, the emissive readout probe can contain internal labels which may be the same or different. In some embodiments, the labels are the same. In some embodiments, the labels are different.

[0417] In some embodiments, the label is a fluorescent entity (fluorophore) or phosphorescent entity. In some embodiments, the label is a cyanine dye (e.g., Cy2, Cy3, Cy3B, Cy5, Cy5.5, Cy7, etc.), Alexa Fluor dye, Atto dye, photo switchable dye, photoactivatable dye, fluorescent dye, metal nanoparticle, semiconductor nanoparticle or “quantum dots”, fluorescent protein such as GFP (Green Fluorescent Protein), or photoactivatable fluorescent protein, such as PAGFP, PSCFP, PSCFP2, Dendra, Dendra2, EosFP, tdEos, mEos2, mEos3, PAmCherry, PAtagRFP, mMaple, mMaple2, and mMaple3.

[0418] In some embodiments, the label is Alexa Fluor 350, Alexa Fluor 405, Alexa Fluor 430, Alexa Fluor 488, Alexa Fluor 514, Alexa Fluor 532, Alexa Fluor 546, Alexa Fluor 555, Alexa Fluor 561, Alexa Fluor 568, Alexa Fluor 594, Alexa Fluor 610, Alexa Fluor 633, Alexa Fluor 635, Alexa Fluor 647, Alexa Fluor 647-R-phycoerythrin, Alexa Fluor 660, Alexa Fluor 680, Alexa Fluor 680-allophycocyanin, Alexa Fluor 700, Alexa Fluor 750, Alexa Fluor 790, Alexa Fluor Plus 405, Alexa Fluor Plus 488, Alexa Fluor Plus 555, Alexa Fluor Plus 594, Alexa Fluor Plus 647, Alexa Fluor Plus 680, Alexa Fluor Plus 750, Alexa Fluor Plus 800, Pacific Blue, Pacific Green, Rhodamine Red X, DyLight 485-LS, DyLight-510-LS, DyLight 515-LS, DyLight 521-LS, Hydroxycoumarin, methoxycoumarin, Cy2, FAM, Fluorescein FITC, R-phycoerythrin (PE), Tamara, Cy3.5 581, Rox, Red 613, Texas Red, Cy5, Cy5.5, Cy7, Allophycocyanin, ATTO 430LS, ATTO 490LS, ATTO 390, ATTO 425, Cyan 500 NHS-Ester, ATTO 465, ATTO 488, ATTO 495, ATTO Rho110, ATTO 514, ATTO 520, ATTO 532, ATTO Rho6G, ATTO 542, ATTO 550, ATTO 565, ATTO Rho3B, ATTO Rho11, ATTO Rho12, ATTO Thio12, ATTO Rho101, ATTO 590, ATTO 594, ATTO Rho13, ATTO 610, ATTO 620, ATTO Rho14, ATTO 633, ATTO 643, ATTO 647, ATTO 647N, ATTO 655, ATTO Oxa12, ATTO 665, ATTO 680, ATTO 700, ATTO 725, ATTO 740.

### EMBODIMENTS

[0419] Embodiments of the present subject matter disclosed herein may be beneficial alone or in combination with one or more other embodiments. Without limiting the foregoing description, certain non-limiting embodiments of the disclosure, numbered I-1 to 11-37 are provided below. As will be apparent to those of skill in the art upon reading this disclosure, each of the individually numbered embodiments may be used or combined with any of the preceding or following individually numbered embodiments. This is intended to provide support for all such combinations of embodiments and is not limited to combinations of embodiments explicitly provided below.

### Embodiments of the Disclosure

[0420] Embodiment I-1: A method of characterizing a microbial cell from a biological sample, the method comprising a) directly inoculating the microbe onto a device; b) identifying the microbe; and c) detecting susceptibility to one or more antimicrobial agents.

[0421] Embodiment II-1: A method of characterizing a microbial cell from a biological sample, the method comprising a) directly inoculating the microbe onto a device; b) identifying the microbe; and c) detecting future susceptibility to one or more antimicrobial agents.

[0422] Embodiment II-2: The method of embodiments I-1 or II-1, wherein the sample is not subjected to culturing before the microbe is inoculated onto the device.

[0423] Embodiment II-3: The method of embodiments I-1 or II-1 to II-2, wherein the microbe in the sample is cultured for one to 12 cell divisions before it is inoculated onto the device.

[0424] Embodiment II-4: The method of embodiments I-1 or II-1 to II-3, wherein the microbe is identified by in situ hybridization.

[0425] Embodiment II-5: The method of embodiments I-1 or II-1 to II-4, wherein the microbe is identified by fluorescence in situ hybridization (FISH).

[0426] Embodiment II-6: The method of embodiments I-1 or II-1 to II-5, wherein the fluorescence in situ hybridization is high-phylogenetic-resolution fluorescence in situ hybridization (HiPR-FISH).

[0427] Embodiment II-7: The method of embodiments I-1 or II-1 to II-6, wherein the microbe is further characterized via live-cell imaging or dynamic calculation while in situ hybridization is performed.

[0428] Embodiment II-8: The method of embodiments I-1 or II-1 to II-7, wherein the microbe is identified by hybridization of a bar-coded probe a 16S ribosomal RNA sequence in the microbe, 5S ribosomal RNA sequence in the microbe, and/or 23S ribosomal RNA sequence in the microbe.

[0429] Embodiment II-9: The method of embodiments I-1 or II-1 to II-8, wherein the in situ hybridization is multiplexed.

[0430] Embodiment II-10: The method of embodiments I-1 or II-1 to II-9, wherein the susceptibility to one or more microbial agents is determined by measuring the minimum inhibitory concentration of the microbe when exposed to an antimicrobial agent.

[0431] Embodiment II-11: The method of embodiments I-1 or II-1 to II-10, wherein the susceptibility to one or more microbial agents is determined by measuring microbial cell metabolism when the microbe is exposed to an antimicrobial agent.

[0432] Embodiment II-12: The method of embodiments I-1 or II-1 to II-11, wherein microbial cell metabolism is measured by determining the concentration of dissolved carbon dioxide, oxygen consumption of microbes in the sample, expression of genes involved in cell division and/or growth, or expression of stress response genes.

[0433] Embodiment II-13: The method of embodiments I-1 or II-1 to II-12, wherein microbial cell susceptibility is determined by a live/dead stain.

[0434] Embodiment II-14: The method of embodiments I-1 or II-1 to II-13, wherein microbial cell susceptibility is determined by cell number.

[0435] Embodiment II-15: The method of embodiments I-1 or II-1 to II-14, wherein microbial cell susceptibility is determined by detecting the presence or absence of one or more antimicrobial genes in the microbial cell.

[0436] Embodiment II-16: The method of embodiments I-1 or II-1 to II-15, wherein microbial cell susceptibility is determined by detecting the presence or absence of one or more gene mutations associated with the development of antimicrobial resistance or susceptibility in the microbial cell.

[0437] Embodiment II-17: The method of embodiments I-1 or II-1 to II-16, wherein future microbial cell susceptibility is determined by detecting the presence or absence of one or more antimicrobial genes in the microbial cell.

[0438] Embodiment II-18: The method of embodiments I-1 or II-1 to II-17, wherein future microbial cell susceptibility is determined by detecting the presence or absence of one or more gene mutations associated with the development of antimicrobial resistance or susceptibility in the microbial cell.

[0439] Embodiment II-19: The method of embodiments I-1 or II-1 to II-18, wherein the one or more gene mutations associated with the development of antimicrobial resistance or susceptibility is selected from deletions, duplications, single nucleotide polymorphisms (SNPs), frame-shift mutations, inversions, insertions, and/or nucleotide substitutions.

[0440] Embodiment II-20: The method of embodiments I-1 or II-1 to II-19, wherein the one or more antimicrobial genes is selected from: genes encoding multidrug resistance proteins (e.g. PDR1, PDR3, PDR7, PDR9), ABC transporters (e.g. SNQ2, STE6, PDR5, PDR10, PDR11, YOR1), membrane associated transporters (GAS1, D4405), soluble proteins (e.g. G3PD), RNA polymerase, rpoB, gyrA, gyrB, 16S RNA, 23S rRNA, NADPH nitroreductase, sul2, strAB, tetAR, aac3-iid, aph, sph, cmy-2, floR, tetB; aadA, aac3-VIa, and sul1.

[0441] Embodiment II-21: The method of embodiments I-1 or II-1 to II-20, wherein the presence or absence of one or more antimicrobial genes, or the gene mutation associated with the development of antimicrobial resistance or susceptibility in the microbial cell is detected using in situ hybridization.

[0442] Embodiment II-22: The method of embodiments I-1 or II-1 to II-21, wherein the presence or absence of one or more antimicrobial genes, or the gene mutation associated with the development of antimicrobial resistance or susceptibility in the microbial cell is detected using fluorescence in situ hybridization (FISH).

[0443] Embodiment II-23: The method of embodiments I-1 or II-1 to II-22, wherein the fluorescence in situ hybridization is high-phylogenetic-resolution fluorescence in situ hybridization (HiPR-FISH).

[0444] Embodiment II-24: The method of embodiments I-1 or II-1 to II-23, wherein the identification of the microbial cell and the detection of susceptibility or future susceptibility to one or more antimicrobial agents occurs sequentially.

[0445] Embodiment II-25: The method of embodiments I-1 or II-1 to II-24, wherein the identification of the microbial cell and the detection of susceptibility or future susceptibility to one or more antimicrobial agents occurs simultaneously.

[0446] Embodiment II-26: The method of embodiments I-1 or II-1 to II-25, wherein the identification of the microbial cell and the detection of susceptibility or future susceptibility to one or more antimicrobial agents occurs in parallel.

[0447] Embodiment II-27: The method of embodiments I-1 or II-1 to II-26, wherein the biological sample is obtained from a patient.

[0448] Embodiment II-28: The method of embodiments I-1 or II-1 to II-27, wherein the biological sample is obtained from a patient diagnosed with or believed to be suffering from an infection or disorder.

[0449] Embodiment II-29: The method of embodiments I-1 or II-1 to II-28, wherein the disease or disorder is an infection.

[0450] Embodiment II-30: The method of embodiments I-1 or II-1 to II-29, wherein the infection is a bacterial, viral, fungal, or parasitic infections.

[0451] Embodiment II-31: The method of embodiments I-1 or II-1 to II-30, wherein the bacterial infection is selected from Mycobacterium, Streptococcus, Staphylococcus, Shigella, Campylobacter, Salmonella, Clostridium, Corynebacterium, Pseudomonas, Neisseria, Listeria, Vibrio, Bordetella, E. coli (including pathogenic E. coli), Pseudomonas aeruginosa, Enterobacter cloacae, Mycobacterium tuberculosis, Staphylococcus aureus, Helicobacter pylori, Legionella, Acinetobacter baumannii, Citrobacter freundii, Citrobacter koseri, Enterobacter cloacae, Enterococcus faecalis, Enterococcus faecium, Escherichia coli, Klebsiella oxytoca, Klebsiella pneumoniae, Proteus mirabilis, Proteus vulgaris, Pseudomonas aeruginosa, Serratia marcescens, Staphylococcus aureus, Staphylococcus saprophyticus, and Streptococcus agalactiae, or a combination thereof.

[0452] Embodiment II-32: The method of embodiments I-1 or II-1 to II-30, wherein the viral infection is selected from Helicobacter pylori, infectious haematopoietic necrosis virus (IHNV), Parvovirus B19, Herpes Simplex Virus, Varicella-zoster virus, Cytomegalovirus, Epstein-Barr virus, Hepatitis A virus, Hepatitis B virus, Hepatitis C virus, Hepatitis D virus, Hepatitis E virus, Measles virus, Mumps virus, Rubella virus, Human Immunodeficiency Virus (HIV), Influenza virus, Rhinovirus, Rotavirus A, Rotavirus B, Rotavirus C, Respiratory Syncytial Virus (RSV), Varicella zoster, Poliovirus, Norovirus, Zika Virus, Dengue Virus, Rabies Virus, Newcastle Disease Virus, and White Spot Syndrome Virus, or a combination thereof.

[0453] Embodiment II-33: The method of embodiments I-1 or II-1 to II-30, wherein the fungal infection is selected from Aspergillus, Candida, Pneumocystis, Blastomyces, Coccidioides, Cryptococcus, and Histoplasma, or a combination thereof.

[0454] Embodiment II-34: The method of embodiments I-1 or II-1 to II-30, wherein the parasitic infection is selected from Plasmodium (i.e. P. falciparum, P. malariae, P. ovale, P. knowlesi, and P. vivax), Trypanosoma, Toxoplasma, Giardia, and Leishmania, Cryptosporidium, helminthic parasites: Trichuris spp. (whipworms), Enterobius spp. (pinworms), Ascaris spp. (roundworms), Ancylostoma spp. and Necator spp. (hookworms), Strongyloides spp. (threadworms), Dracunculus spp. (Guinea worms), Onchocerca spp. and Wuchereria spp. (filarial worms), Taenia spp., Echinococcus spp., and Diphyllobothrium spp. (human and animal cestodes), Fasciola spp. (liver flukes) and Schistosoma spp. (blood flukes), or a combination thereof.

[0455] Embodiment II-35: The method of embodiments I-1 or II-1 to II-34, wherein the biological sample is selected from bronchoalveolar lavage fluid (BAL), blood, serum, plasma, urine, cerebrospinal fluid, pleural fluid, synovial fluid, ocular fluid, peritoneal fluid, amniotic fluid, gastric fluid, lymph fluid, interstitial fluid, tissue homogenate, cell extracts, saliva, sputum, stool, physiological secretions, tears, mucus, sweat, milk, semen, seminal fluid, vaginal secretions, fluid from ulcers and other surface eruptions, blisters, and abscesses, and extracts of tissues including biopsies of normal, malignant, and suspect tissues or any other constituents of the body which may contain the microorganism of interest.

[0456] Embodiment II-36: The method of embodiments I-1 or II-1 to II-34, wherein the biological sample is a human oral microbiome sample.

[0457] Embodiment II-37: The method of embodiments I-1 or II-1 to II-34, wherein the biological sample is a whole organism.

[0458] Embodiment III-1: A method for analyzing a sample, comprising:
[0459] contacting at least one encoding probe with the sample to produce a first complex, wherein each encoding probe comprises a targeting sequence, a first landing pad sequence, and a second landing pad sequence;
[0460] adding at least one first emissive readout probe to the first complex, wherein the first emissive readout probe comprises a label and a sequence complementary to the first landing pad sequence;
[0461] acquiring one or more emission spectra from the first emissive readout probe;
[0462] adding an exchange probe to the sample, wherein the exchange probe comprises a 100% complementary sequence to the first emissive readout probe sequence,
[0463] hybridizing the exchange probe to the first emissive readout probe to form a second complex;
[0464] removing the second complex from the sample,
[0465] adding at least one second emissive readout probe to the first complex, wherein the second emissive readout probe comprises a label and a sequence complementary to the second landing pad sequence;
[0466] acquiring one or more emission spectra from the second emissive readout probe;
[0467] repeating the aforementioned steps for at least one different encoding probe;
[0468] determining the spectra of “signal” (e.g., puncta, blobs) and assigning them to a species of interest; and
[0469] decoding the spectra into a single, targeted transcript through means of signal deconvolution, error correction, comparison to reference standards.

[0470] Embodiment IV-1: A method for analyzing a sample, comprising:
[0471] generating a set of probes, wherein each probe comprises:
[0472] (i) a targeting sequence;
[0473] (ii) a first landing pad sequence; and
[0474] (iii) a second landing pad sequence;
[0475] contacting the set of probes with the sample to permit hybridization of the probes to nucleotides present in the sample to produce a complex;
[0476] adding a first set of emissive readout probes to the complex, wherein each emissive readout probe comprises:
[0477] (i) a label, and
[0478] (ii) a sequence complementary to the first or second landing pad sequence;
[0479] acquiring one or more emission spectra from the first emissive readout probe;
[0480] adding a set of exchange probes to the sample, wherein each exchange probe comprises a 100% complementary sequence to the first emissive readout probe sequences,
[0481] hybridizing the exchange probes to the first emissive readout probes to form a second complex;
[0482] removing the second complex from the sample,
[0483] adding a second set of emissive readout probes to the complex, wherein each emissive readout probe comprises:
[0484] (i) a label, and
[0485] (ii) a sequence complementary to the first or second landing pad sequence;
[0486] acquiring one or more emission spectra from the second emissive readout probe;
[0487] determining the spectra of “signal” (e.g., puncta, blobs) and assigning them to a species of interest; and
[0488] decoding the spectra into a single, targeted transcript through means of signal deconvolution, error correction, comparison to reference standards.

[0489] Embodiment IV-2: The method of embodiments III-1 or IV-1, wherein the sample is at least one of a cell, a cell suspension, a tissue biopsy, a tissue specimen, urine, stool, blood, serum, plasma, bone biopsies, bone marrow, respiratory specimens, sputum, induced sputum, tracheal aspirates, bronchoalveolar lavage fluid, sweat, saliva, tears, ocular fluid, cerebral spinal fluid, pericardial fluid, pleural fluid, peritoneal fluid, placenta, amnion, pus, nasal swabs, nasopharyngeal swabs, oropharyngeal swabs, ocular swabs, skin swabs, wound swabs, mucosal swabs, buccal swabs, vaginal swabs, vulvar swabs, nails, nail scrapings, hair follicles, corneal scrapings, gavage fluids, gargle fluids, abscess fluids, wastewater, or plant biopsies.

[0490] Embodiment IV-3: The method of embodiment IV-2, wherein the sample is a cell.

[0491] Embodiment IV-4: The method of embodiment IV-3, wherein the cell is a bacterial or eukaryotic cell.

[0492] Embodiment IV-5: The method of embodiment IV-2, wherein the sample comprises a plurality of cells.

[0493] Embodiment IV-6: The method of embodiment IV-5, wherein each cell comprises a specific targeting sequence.

[0494] Embodiment IV-7: The method of Embodiments III-1 or IV-1, wherein the targeting sequence targets at least one of messenger RNA (mRNA), microRNA (miRNA), long non-coding RNA (lncRNA), ribosomal RNA (rRNA), small interfering RNA (siRNA), transfer RNA (tRNA), Crispr RNA (crRNA), trans-activating CRISPR RNA (tracrRNA), mitochondrial RNA, intronic RNA, viral mRNA, viral genomic RNA, environmental RNA, double-stranded RNA (dsRNA), small nuclear RNA (snRNA), small nucleolar (snoRNA), PIWI-interacting RNA (piRNA), genomic DNA, synthetic DNA, DNA, plasmid DNA, a plasmid, viral DNA, retroviral DNA, environmental DNA, extracellular DNA, a protein, a small molecule, or an antigenic target.

[0495] Embodiment IV-8: The method of embodiment IV-7, wherein the target is mRNA.

[0496] Embodiment IV-9: The method of embodiment IV-7, wherein the target is rRNA.

[0497] Embodiment IV-10: The method of embodiment IV-7, wherein the target is mRNA and rRNA.

[0498] Embodiment IV-11: The method of Embodiments III-1 or IV-1, wherein the at least one encoding probe comprises the first landing pad sequence on the 5′ end, and the second landing pad sequence on the 3′ end.

[0499] Embodiment IV-12: The method of Embodiments III-1 or IV-1, wherein the at least one encoding probe comprises the first landing pad sequence on the 3′ end, and the second landing pad sequence on the 5′ end.

[0500] Embodiment IV-13: The method of embodiment IV-12, wherein the first landing pad sequence and the second landing pad sequences have different sequences.

[0501] Embodiment IV-14: The method of Embodiments III-1 or IV-1, wherein the at least one first or second emissive readout probe comprises a label on the 5′ or 3′ end.

[0502] Embodiment IV-15: The method of Embodiments III-1 or IV-1, wherein the label is Alexa Fluor 350, Alexa Fluor 405, Alexa Fluor 430, Alexa Fluor 488, Alexa Fluor 514, Alexa Fluor 532, Alexa Fluor 546, Alexa Fluor 555, Alexa Fluor 561, Alexa Fluor 568, Alexa Fluor 594, Alexa Fluor 610, Alexa Fluor 633, Alexa Fluor 635, Alexa Fluor 647, Alexa Fluor 647-R-phycoerythrin, Alexa Fluor 660, Alexa Fluor 680, Alexa Fluor 680-allophycocyanin, Alexa Fluor 700, Alexa Fluor 750, Alexa Fluor 790, Alexa Fluor Plus 405, Alexa Fluor Plus 488, Alexa Fluor Plus 555, Alexa Fluor Plus 594, Alexa Fluor Plus 647, Alexa Fluor Plus 680, Alexa Fluor Plus 750, Alexa Fluor Plus 800, Pacific Blue, Pacific Green, Rhodamine Red X, DyLight 485-LS, DyLight-510-LS, DyLight 515-LS, DyLight 521-LS, Hydroxycoumarin, methoxycoumarin, Cy2, FAM, Fluorescein FITC, R-phycoerythrin (PE), Tamara, Cy3.5 581, Rox, Red 613, Texas Red, Cy5, Cy5.5, Cy7, Allophycocyanin, ATTO 430LS, ATTO 490LS, ATTO 390, ATTO 425, Cyan 500 NHS-Ester, ATTO 465, ATTO 488, ATTO 495, ATTO Rho110, ATTO 514, ATTO 520, ATTO 532, ATTO Rho6G, ATTO 542, ATTO 550, ATTO 565, ATTO Rho3B, ATTO Rho11, ATTO Rho12, ATTO Thio12, ATTO Rho101, ATTO 590, ATTO 594, ATTO Rho13, ATTO 610, ATTO 620, ATTO Rho14, ATTO 633, ATTO 643, ATTO 647, ATTO 647N, ATTO 655, ATTO Oxa12, ATTO 665, ATTO 680, ATTO 700, ATTO 725, ATTO 740.

[0503] Embodiment IV-16: The method of Embodiments III-1 or IV-1, wherein the one or more emission spectra of the first and/or second emissive readout probe is acquired via widefield microscopy, point scanning confocal microscopy, spinning disk confocal microscopy, lattice lightsheet microscopy, or light field microscopy.

[0504] Embodiment IV-17: The method of embodiment IV-17, wherein the detection strategy used is channel, spectral, channel and fluorescence lifetime, or spectral and fluorescence lifetime.

[0505] Embodiment IV-18: The method of Embodiments III-1 or IV-1, wherein the sample is on an analyzing platform, wherein the analyzing platform is a microscope slide, at least one chamber, at least one microfluidic device, at least one well, at least one plate, or at least one filter membrane.

[0506] Embodiment IV-19: The method of Embodiments III-1 or IV-1, wherein adding an exchange probe to the sample, hybridizing the exchange probe to the first emissive readout probe, and removing the second complex from the sample are performed in the same step.

[0507] Embodiment IV-20: The method of Embodiments III-1 or IV-1, wherein hybridizing the exchange probe to the first or second emissive readout probe results in de-hybridization of the first or second emissive readout probe from the first or second landing pad sequence.

[0508] Embodiment IV-21: The method of embodiments IV-19 or IV-20, wherein the step is achieved within 1 hour.

[0509] Embodiment IV-22: The method of embodiments IV-19 or IV-20, wherein the step is achieved overnight.

[0510] Embodiment IV-23: The method of any one of embodiments III-1, or IV-1 to IV-22, wherein the emissive readout probe sequence is at least 5 nucleotides longer than the first or second landing pad sequences.

[0511] Embodiment V-1: A construct comprising:
[0512] a targeting sequence that is a region of interest on a nucleotide;
[0513] a first landing pad sequence;
[0514] a second landing pad sequence, wherein the second landing pad sequence is different from the first landing pad sequence;
[0515] a first emissive readout probe comprising a first label and a sequence complimentary to the first landing pad sequence;
[0516] an exchange probe comprising a 100% complementary sequence to the first emissive readout probe sequences; and
[0517] a second emissive readout probe comprising a second label and a sequence complimentary to the second landing pad sequence.

[0518] Embodiment VI-1: A library of constructs comprising a plurality of barcoded probes, wherein each barcoded probe comprises:
[0519] a targeting sequence that is a region of interest on a nucleotide;
[0520] a first landing pad sequence;
[0521] a second landing pad sequence, wherein the second landing pad sequence is different from the first landing pad sequence;
[0522] a first emissive readout probe comprising a first label and a sequence complimentary to the first landing pad sequence;
[0523] an exchange probe comprising a 100% complementary sequence to the first emissive readout probe sequences; and
[0524] a second emissive readout probe comprising a second label and a sequence complimentary to the second landing pad sequence.

[0525] Embodiment VI-2: The construct of embodiments V-1 or VI-2, wherein the first emissive readout probe sequence is at least 5 nucleotides longer than the first landing pad sequence.

[0526] Embodiment VI-3: The construct of embodiments V-1 or VI-2, wherein the second emissive readout probe sequence is at least 5 nucleotides longer than the second landing pad sequence.

[0527] Embodiment VI-4: The construct of embodiments V-1 or VI-2, wherein the first landing pad sequence and the second landing pad sequences have different sequences.

[0528] Embodiment VI-5: The construct of embodiments V-1 or VI-2, wherein the first emissive readout probe comprises the first label on the 5′ or 3′ end.

[0529] Embodiment VI-6: The construct of embodiments V-1 or VI-2, wherein the second emissive readout probe comprises the second label on the 5′ or 3′ end.

[0530] Embodiment VI-7: The construct of embodiments V-1 or VI-2, wherein the first or second label is each Alexa Fluor 350, Alexa Fluor 405, Alexa Fluor 430, Alexa Fluor 488, Alexa Fluor 514, Alexa Fluor 532, Alexa Fluor 546, Alexa Fluor 555, Alexa Fluor 561, Alexa Fluor 568, Alexa Fluor 594, Alexa Fluor 610, Alexa Fluor 633, Alexa Fluor 635, Alexa Fluor 647, Alexa Fluor 647-R-phycoerythrin, Alexa Fluor 660, Alexa Fluor 680, Alexa Fluor 680-allophycocyanin, Alexa Fluor 700, Alexa Fluor 750, Alexa Fluor 790, Alexa Fluor Plus 405, Alexa Fluor Plus 488, Alexa Fluor Plus 555, Alexa Fluor Plus 594, Alexa Fluor Plus 647, Alexa Fluor Plus 680, Alexa Fluor Plus 750, Alexa Fluor Plus 800, Pacific Blue, Pacific Green, Rhodamine Red X, DyLight 485-LS, DyLight-510-LS, DyLight 515-LS, DyLight 521-LS, Hydroxycoumarin, methoxycoumarin, Cy2, FAM, Fluorescein FITC, R-phycoerythrin (PE), Tamara, Cy3.5 581, Rox, Red 613, Texas Red, Cy5, Cy5.5, Cy7, Allophycocyanin, ATTO 430LS, ATTO 490LS, ATTO 390, ATTO 425, Cyan 500 NHS-Ester, ATTO 465, ATTO 488, ATTO 495, ATTO Rho110, ATTO 514, ATTO 520, ATTO 532, ATTO Rho6G, ATTO 542, ATTO 550, ATTO 565, ATTO Rho3B, ATTO Rho11, ATTO Rho12, ATTO Thio12, ATTO Rho101, ATTO 590, ATTO 594, ATTO Rho13, ATTO 610, ATTO 620, ATTO Rho14, ATTO 633, ATTO 643, ATTO 647, ATTO 647N, ATTO 655, ATTO Oxa12, ATTO 665, ATTO 680, ATTO 700, ATTO 725, or ATTO 740.

[0531] Embodiment VII-1: A method for analyzing a bacterial sample, comprising:
[0532] contacting at least one encoding probe with the sample to produce a first complex, wherein each encoding probe comprises a targeting sequence, a first landing pad sequence, and a second landing pad sequence;
[0533] adding at least one first emissive readout probe to the first complex, wherein the first emissive readout probe comprises a label and a sequence complementary to the first landing pad sequence;
[0534] detecting the first emissive readout probe with a confocal microscope;
[0535] adding an exchange probe to the sample, wherein the exchange probe comprises a 100% complementary sequence to the first emissive readout probe sequence,
[0536] hybridizing the exchange probe to the first emissive readout probe to form a second complex;
[0537] removing the second complex from the sample,
[0538] adding at least one second emissive readout probe to the first complex, wherein the second emissive readout probe comprises a label and a sequence complementary to the second landing pad sequence;
[0539] detecting the second emissive readout probe with a confocal microscope;
[0540] repeating the aforementioned steps for at least one different encoding probe;
[0541] determining the spectra of “signal” (e.g., puncta, blobs) and assigning them to a bacterium; and
[0542] decoding the spectra into a single, targeted transcript through means of signal deconvolution, error correction, comparison to reference standards.

[0543] Embodiment VIII-1: A method for analyzing a bacterial sample, comprising:
[0544] generating a set of probes, wherein each probe comprises:
[0545] (i) a targeting sequence;
[0546] (ii) a first landing pad sequence; and
[0547] (iii) a second landing pad sequence;
[0548] contacting the set of probes with the sample to permit hybridization of the probes to nucleotides present in the sample to produce a complex;
[0549] adding a first set of emissive readout probes to the complex, wherein each emissive readout probe comprises:
[0550] (i) a label, and
[0551] (ii) a sequence complementary to the first or second landing pad sequence;
[0552] detecting the first set of emissive readout probes in the sample with a confocal microscope;
[0553] adding a set of exchange probes to the sample, wherein each exchange probe comprises a 100% complementary sequence to the first emissive readout probe sequences,
[0554] hybridizing the exchange probes to the first emissive readout probes to form a second complex;
[0555] removing the second complex from the sample,
[0556] adding a second set of emissive readout probes to the complex, wherein each emissive readout probe comprises:
[0557] (i) a label, and
[0558] (ii) a sequence complementary to the first or second landing pad sequence;
[0559] detecting the second set of emissive readout probes in the sample with a confocal microscope;
[0560] determining the spectra of “signal” (e.g., puncta, blobs) and assigning them to a bacterium; and
[0561] decoding the spectra into a single, targeted transcript through means of signal deconvolution, error correction, comparison to reference standards.

### EXAMPLES

### Abbreviations and Definitions

| Abbreviation | Definition |
|---|---|
| SSC | sodium chloride sodium citrate |
| SSCT | 2x SSC + 0.1% Tween 20 |
| SDS | Sodium dodecyl sulfate |
| EDTA | Ethylenediaminetetraacetic acid |
| Tris HCl | Tris Hydrochloride |
| | (tris(hydroxymethyl)aminomethane |
| | hydrochloride) |
| NaCl | Sodium chloride |
| PBS | Phosphate-buffered saline |
| RT | Room temperature |

### Example 1. Identification and Antimicrobial Susceptibility Characterization of Microbes

[0563] To enable parallel measurement of cellular state at different antibiotic concentrations, microbial cells are colocalized with a volume of antibiotic solution with a known concentration. This objective can potentially be achieved in several ways.

[0564] Solution 1: a buffer containing cells are applied to a plate with microfabricated wells (well size can be hundreds of microns to millimeters). Cells may be allowed to settle into individual wells by gravity or by centrifugation. After cell settlement, excess solutions are removed. Subsequently, a hydrated gel (agar, agarose, polyethylene glycol, or polyacrylamide, for example) loaded with an antimicrobial gradient can be applied over the top of the plate, allowing different wells to be exposed to different concentrations of antimicrobial compounds. Solution 2: a buffer containing cells are passed through a microfluidic device to convert the bulk solution into a solution of droplets, where each droplet may contain zero or more cells. The cell droplets are then merged with droplets of antimicrobial solutions using a second microfluidic device, allowing different cells to be exposed to antimicrobial solutions at different concentrations. The antimicrobial solution can be colored with food coloring, or other bacteria-compatible dyes, to allow them to be distinguished on an imaging device. Solution 3: a buffer containing cells are microencapsulated into semipermeable polymeric beads. The polymer beads containing microbial cells are then distributed into wells on a plate, where each well contains a known concentration of antimicrobial compounds.

### Example 2. Identification of Microbes in Patient Sample

[0565] The methods of the disclosure were used to identify microbes and drug-resistance phenotype in patient urine samples. The experimental set up is shown in FIG. 2. A 75-well plate is created with 2-fold dilution series of ten different antibiotics, and the urine samples collected from the patients were deposited over each well. The plate was incubated for 2 hours, and fixed, and HiPR-FISH was performed. Samples were tested at time 0 and 2 hours of the incubation as shown in FIG. 5. After this process (about 4 hours total), spectral imaging was used to identify the microbial species in the patient sample. The detection panel used here detects and differentiates between the following bacteria:
[0566] Acinetobacter baumannii
[0567] Citrobacter freundii
[0568] Citrobacter koseri
[0569] Enterobacter cloacae
[0570] Enterococcus faecalis
[0571] Enterococcus faecium
[0572] Escherichia coli
[0573] Klebsiella oxytoca
[0574] Klebsiella pneumoniae
[0575] Proteus mirabilis
[0576] Proteus vulgaris
[0577] Pseudomonas aeruginosa
[0578] Serratia marcescens
[0579] Staphylococcus aureus
[0580] Staphylococcus saprophyticus
[0581] Streptococcus agalactiae

### Example 2.1

[0582] FIG. 3 shows the identification of E. coli in three different patient samples using the following methodology.

[0583] Specimens were stored in a mixture of urine supernatant and glycerol and frozen at −80° C. until time of processing. Specimens were thawed and deposited onto the device and incubated at 37° C. for one hour. The specimen was biologically fixed by depositing 2% formaldehyde onto the specimen and incubated for thirty minutes at room temperature. The specimens were washed using 1×PBS multiple times at room temperature. An encoding buffer (2×SSC, 10% dextran sulfate, 10% ethylene carbonate, 5×Denhardt's solution, 0.01% SDS) with probes designed for a panel of uropathogens (at roughly 200 nM per taxon) was deposited on cells and incubated for two hours at 37° C. A wash buffer (5 mM EDTA, 20 mM Tris HCl, 215 mM NaCl) was then deposited on specimens for fifteen minutes at 37° C. to remove unbound probes. A buffer containing readout probes (10 readout probes, each at 400 nM; buffer made up of 2×SSC, 10% dextran sulfate, 10% ethylene carbonate, 5×Denhardt's solution, 0.01% SDS) was incubated for 30 minutes at room temperature. A second round of wash buffer was deposited on specimens for fifteen minutes at 37° C. to remove unbound probe. The specimens were then suspended in 2×SSC and a coverslip was placed directly over the specimens for imaging on a confocal microscope.

### Example 2.2

[0584] FIG. 4 shows the identification of different species including A. baumannii, C. freundii, S. saprophyticus, and a mixture of A. baumannii and C. freundii using different excitation wavelengths, using the following methodology.

[0585] Suspensions of individual monocultures were fixed by adding an equal volume of 2% formaldehyde, mixing, and incubating for 90 minutes at room temperature. Fixed cultures were then washed with 1×PBS and resuspended in 50% ethanol. Single taxa suspensions or mixed suspensions containing multiple taxa, were deposited onto glass microscope slides until 50% ethanol had evaporated. Lysosyme (10 mg/mL) was deposited onto each dry specimen to permeabilize the outer membrane and incubated for 30 minutes at 37° C., the slides were then washed with 1×PBS. An encoding probe hybridization buffer (2×SSC, 10% dextran sulfate, 10% ethylene carbonate, 5×Denhardt's solution, 0.01% SDS) with probes designed for a panel of uropathogens (at roughly 200 nM per taxon) was deposited on cells and incubated for two hours at 37° C. A wash buffer (5 mM EDTA, 20 mM Tris HCl, 215 mM NaCl) was then deposited on specimens for fifteen minutes at 37° C. to remove unbound probes. A buffer containing readout probes (10 readout probes, each at 400 nM; buffer made up of 2×SSC, 10% dextran sulfate, 10% ethylene carbonate, 5×Denhardt's solution, 0.01% SDS) was incubated for one hour at room temperature. A second round of wash buffer was deposited on specimens for fifteen minutes at 37° C. to remove unbound probe. The specimens were mounted with Prolong Glass and a coverslip was placed directly over the specimens for imaging on confocal microscope.

[0586] Table 1 shows the sequences of the readout probes used various Examples disclosed herein. Table 2 shows the sequences of the encoding probes used in Examples 2.1 and 2.2.

TABLE 1
Readout Probes

| SEQ | | |
|---|---|---|
| ID | | Sequence |
| NO: | Probe Name | (in 5′ to 3′ order) |
| 1 | Readout Probe 1 | /5Alex488N/TATCCTTCAATCCC |
| | | TCCACA |
| 2 | Readout Probe 2 | /5Alex546N/ACACTACCACCATT |
| | | TCCTAT |
| 3 | Readout Probe 3 | /56-ROXN/ACTCCACTACTACTCA |
| | | CTCT/3Rox_N/ |
| 4 | Readout Probe 4 | /5PacificGreenN/ACCCTCTA |
| | | ACTTCCATCACA |
| 5 | Readout Probe 5 | /5PacificBlueN/ACCACAACCC |
| | | ATTCCTTTCA |
| 6 | Readout Probe 6 | /5Atto610N/TTTACTCCCTACAC |
| | | CTCAA |
| 7 | Readout Probe 7 | /5Alex647N/ACCCTTTACAAACA |
| | | CACCCT |
| 8 | Readout Probe 8 | /5DyLight-510-LS/TCCTATTC |
| | | TCAACCTAACCT/3DyLight-510- |
| | | LS/ |
| 9 | Readout Probe 9 | /5Alex405N/TTCTCCCTCTATCA |
| | | ACTCTA |
| 10 | Readout Probe 10 | /5Alex532N/ACCCTTACTACTAC |
| | | ATCATC/3Alexa532N/ |

TABLE 2
Encoding Probes used in Examples 2.1 and 2.2

| SEQ ID | | |
|---|---|---|
| NO: | Probe Name | Sequence (in 5′ to 3′ order) |
| 11 | Encoding Probe 1 | TGTGGAGGGATTGAAGGATACACCTCCTTGCTAT |
| | | AGCCACCTTATGTGGAGGGATTGAAGGATA |
| 12 | Encoding Probe 2 | TGTGGAGGGATTGAAGGATAGGCAACATCAGAG |
| | | AAGCAAGCAAGTGTGGAGGGATTGAAGGATA |
| 13 | Encoding Probe 3 | TGTGGAGGGATTGAAGGATAAGCGACACAATGT |
| | | CTTCTCCCGTATGTGGAGGGATTGAAGGATA |
| 14 | Encoding Probe 4 | TGTGGAGGGATTGAAGGATATCTCAATGTCTTCT |
| | | CCCCATCAGTCTGTGGAGGGATTGAAGGATA |
| 15 | Encoding Probe 5 | TGTGGAGGGATTGAAGGATACATGGCACCTATTT |
| | | TCTATCTAGAGCGATGTGGAGGGATTGAAGGATA |
| 16 | Encoding Probe 6 | TGTGGAGGGATTGAAGGATACTGGAAGACACAA |
| | | TGTCTTCTCAGGTGTGGAGGGATTGAAGGATA |
| 17 | Encoding Probe 7 | TGTGGAGGGATTGAAGGATAGTCCAGCCTTAATG |
| | | AGTACCGCTATGTGGAGGGATTGAAGGATA |
| 18 | Encoding Probe 8 | TGTGGAGGGATTGAAGGATAGGATCGATTAAAA |
| | | CGATTATAGGTGGATGTGTGGAGGGATTGAAGG |
| | | ATA |
| 19 | Encoding Probe 9 | TGTGGAGGGATTGAAGGATAGGACGATTAAAAC |
| | | GATTATAGGTGGTTGTTGTGGAGGGATTGAAGGA |
| | | TA |
| 20 | Encoding Probe 10 | TGTGGAGGGATTGAAGGATAATTGACAGCAAGA |
| | | CCGTCTTTGTGTGTGGAGGGATTGAAGGATA |
| 21 | Encoding Probe 11 | TGTGGAGGGATTGAAGGATAGATATTGTCCAAAG |
| | | GACAATCCTGTTGTGGAGGGATTGAAGGATA |
| 22 | Encoding Probe 12 | TGTGGAGGGATTGAAGGATATTCACAATGTCTTC |
| | | TCCCCATGTGTGTGGAGGGATTGAAGGATA |
| 23 | Encoding Probe 13 | TGTGGAGGGATTGAAGGATAGGATCACCCATGTT |
| | | CTGACTCGGTTGTGGAGGGATTGAAGGATA |
| 24 | Encoding Probe 14 | TGTGGAGGGATTGAAGGATAATCCTCACGTTTCA |
| | | AAGGCTCGATTGTGGAGGGATTGAAGGATA |
| 25 | Encoding Probe 15 | TGTGGAGGGATTGAAGGATAAAGCGCTACCCTCA |
| | | GTTCATCCCGATGTGGAGGGATTGAAGGATA |
| 26 | Encoding Probe 16 | TGTGGAGGGATTGAAGGATAAAGCCTGACCAAG |
| | | GGTAGATCTGGTGTGGAGGGATTGAAGGATA |
| 27 | Encoding Probe 17 | TGTGGAGGGATTGAAGGATATTGCAACCTGACCA |
| | | AGGGTAGTAGTGTGGAGGGATTGAAGGATA |
| 28 | Encoding Probe 18 | TGTGGAGGGATTGAAGGATAGATATCAGAGAAG |
| | | CAAGCTTCAGCTGTGGAGGGATTGAAGGATA |
| 29 | Encoding Probe 19 | TGTGGAGGGATTGAAGGATAAGGTCAAGAGAGA |
| | | CAACATTTTCCTGTGTGGAGGGATTGAAGGATA |
| 30 | Encoding Probe 20 | TGTGGAGGGATTGAAGGATACTATTCGTCTAATG |
| | | TCGTCCTTTCATTGTGGAGGGATTGAAGGATA |
| 31 | Encoding Probe 21 | TGTGGAGGGATTGAAGGATATGACTAATGCAGC |
| | | GCGGATCCTAGTGTGGAGGGATTGAAGGATA |
| 32 | Encoding Probe 22 | TGTGGAGGGATTGAAGGATATATTGACAGCAAG |
| | | ACCGTCTTAGTTGTGGAGGGATTGAAGGATA |
| 33 | Encoding Probe 23 | TGTGGAGGGATTGAAGGATACAGCCGCTAACATC |
| | | AGAGAAGCTTCTGTGGAGGGATTGAAGGATA |
| 34 | Encoding Probe 24 | TGTGGAGGGATTGAAGGATACAGCTCCACATGTC |
| | | ACCATGCAAGTGTGGAGGGATTGAAGGATA |
| 35 | Encoding Probe 25 | TGTGGAGGGATTGAAGGATACAAAAAGCCAACA |
| | | CAGCTAGGCATTGTGGAGGGATTGAAGGATA |
| 36 | Encoding Probe 26 | ATAGGAAATGGTGGTAGTGTGATCAACAACGCAT |
| | | AAGCGTCGCACGATAGGAAATGGTGGTAGTGT |
| 37 | Encoding Probe 27 | ATAGGAAATGGTGGTAGTGTGGACCAACAACGC |
| | | ATAAGCGTCGCACGATAGGAAATGGTGGTAGTGT |
| 38 | Encoding Probe 28 | ATAGGAAATGGTGGTAGTGTGGACCAACAACGC |
| | | ATAAGCGTCGGACATAGGAAATGGTGGTAGTGT |
| 39 | Encoding Probe 29 | ATAGGAAATGGTGGTAGTGTAAGTCAGGAGACTT |
| | | TAAGTCTCACCCATAGGAAATGGTGGTAGTGT |
| 40 | Encoding Probe 30 | ATAGGAAATGGTGGTAGTGTTTGGGATTACGGGT |
| | | CTACGTTTCTATAGGAAATGGTGGTAGTGT |
| 41 | Encoding Probe 31 | ATAGGAAATGGTGGTAGTGTAGGCAGGAGACTTT |
| | | AAGTCTCAGCCTATAGGAAATGGTGGTAGTGT |
| 42 | Encoding Probe 32 | ATAGGAAATGGTGGTAGTGTGGAAGGAGACTTT |
| | | AAGTCTCAGGCTCATAGGAAATGGTGGTAGTGT |
| 43 | Encoding Probe 33 | ATAGGAAATGGTGGTAGTGTATGAACAACGCAT |
| | | AAGCGTCGCACGATAGGAAATGGTGGTAGTGT |
| 44 | Encoding Probe 34 | ATAGGAAATGGTGGTAGTGTGGACCAACAACGC |
| | | ATAAGCGTCCGAATAGGAAATGGTGGTAGTGT |
| 45 | Encoding Probe 35 | ATAGGAAATGGTGGTAGTGTGATCAACAACGCAT |
| | | AAGCGTCGGACATAGGAAATGGTGGTAGTGT |
| 46 | Encoding Probe 36 | ATAGGAAATGGTGGTAGTGTAGGCAGGAGACTTT |
| | | AAGTCTCACCCATAGGAAATGGTGGTAGTGT |
| 47 | Encoding Probe 37 | ATAGGAAATGGTGGTAGTGTGAAGGAGACTTTA |
| | | AGTCTCAGGCTCATAGGAAATGGTGGTAGTGT |
| 48 | Encoding Probe 38 | ATAGGAAATGGTGGTAGTGTAAGGAGACTTTAA |
| | | GTCTCAGGGTCTATAGGAAATGGTGGTAGTGT |
| 49 | Encoding Probe 39 | ATAGGAAATGGTGGTAGTGTTGTTCAGCGTTAAA |
| | | AGGTACCGCTAATAGGAAATGGTGGTAGTGT |
| 50 | Encoding Probe 40 | ATAGGAAATGGTGGTAGTGTTGGACAACGCATA |
| | | AGCGTCGCACGATAGGAAATGGTGGTAGTGT |
| 51 | Encoding Probe 41 | ATAGGAAATGGTGGTAGTGTGATCAACAACGCAT |
| | | AAGCGTCCGAATAGGAAATGGTGGTAGTGT |
| 52 | Encoding Probe 42 | ATAGGAAATGGTGGTAGTGTATGAACAACGCAT |
| | | AAGCGTCGGACATAGGAAATGGTGGTAGTGT |
| 53 | Encoding Probe 43 | ATAGGAAATGGTGGTAGTGTGGACCAACAACGC |
| | | ATAAGCGTGCGATAGGAAATGGTGGTAGTGT |
| 54 | Encoding Probe 44 | ATAGGAAATGGTGGTAGTGTTGTTCAGCGTTAAA |
| | | AGGTACCCCTATAGGAAATGGTGGTAGTGT |
| 55 | Encoding Probe 45 | ATAGGAAATGGTGGTAGTGTGTGCAGCGTTAAAA |
| | | GGTACCGCTAATAGGAAATGGTGGTAGTGT |
| 56 | Encoding Probe 46 | AGAGTGAGTAGTAGTGGAGTGTGCTCAGTGTTAA |
| | | AGTGCACCCCTAGAGTGAGTAGTAGTGGAGT |
| 57 | Encoding Probe 47 | AGAGTGAGTAGTAGTGGAGTCCGCTCTGCCAAGT |
| | | TCTGTGGTACAGAGTGAGTAGTAGTGGAGT |
| 58 | Encoding Probe 48 | AGAGTGAGTAGTAGTGGAGTGAGTGTTAAAGTG |
| | | CACCGGATTACGAGAGTGAGTAGTAGTGGAGT |
| 59 | Encoding Probe 49 | AGAGTGAGTAGTAGTGGAGTCATCAGCTAACGAT |
| | | AGTGTGACCTCAGAGTGAGTAGTAGTGGAGT |
| 60 | Encoding Probe 50 | AGAGTGAGTAGTAGTGGAGTTCTTTCTCCGCGAG |
| | | GATAACCGGTAGAGTGAGTAGTAGTGGAGT |
| 61 | Encoding Probe 51 | AGAGTGAGTAGTAGTGGAGTTTCCTTCTCCGCGA |
| | | GGATAACCCCTAGAGAGTGAGTAGTAGTGGAGT |
| 62 | Encoding Probe 52 | AGAGTGAGTAGTAGTGGAGTGTCCCATGGGTAA |
| | | ACCACTTCTGGAGAGTGAGTAGTAGTGGAGT |
| 63 | Encoding Probe 53 | AGAGTGAGTAGTAGTGGAGTAGTACGCCTCAGTG |
| | | TTAAAGTCGTAGAGTGAGTAGTAGTGGAGT |
| 64 | Encoding Probe 54 | AGAGTGAGTAGTAGTGGAGTGTGCTCAGTGTTAA |
| | | AGTGCACGCCAGAGTGAGTAGTAGTGGAGT |
| 65 | Encoding Probe 55 | AGAGTGAGTAGTAGTGGAGTCCGCAAGGCATCTC |
| | | TGCCAAGAAGAGAGTGAGTAGTAGTGGAGT |
| 66 | Encoding Probe 56 | AGAGTGAGTAGTAGTGGAGTAGTGTTAAAGTGC |
| | | ACCGGATTACGAGAGTGAGTAGTAGTGGAGT |
| 67 | Encoding Probe 57 | AGAGTGAGTAGTAGTGGAGTATAAGCTAACGAT |
| | | AGTGTGACCTCAGAGTGAGTAGTAGTGGAGT |
| 68 | Encoding Probe 58 | AGAGTGAGTAGTAGTGGAGTCTCTCTCCGCGAGG |
| | | ATAACCCGTAAGAGTGAGTAGTAGTGGAGT |
| 69 | Encoding Probe 59 | AGAGTGAGTAGTAGTGGAGTTCGCTCCGCGAGG |
| | | ATAACCCCTAGAGAGTGAGTAGTAGTGGAGT |
| 70 | Encoding Probe 60 | AGAGTGAGTAGTAGTGGAGTAGTTCCATGGGTAA |
| | | ACCACTTGTGAGAGTGAGTAGTAGTGGAGT |
| 71 | Encoding Probe 61 | AGAGTGAGTAGTAGTGGAGTGTACGCCTCAGTGT |
| | | TAAAGTGGTGAGAGTGAGTAGTAGTGGAGT |
| 72 | Encoding Probe 62 | AGAGTGAGTAGTAGTGGAGTTGCTCAGTGTTAAA |
| | | GTGCACCCCTAGAGTGAGTAGTAGTGGAGT |
| 73 | Encoding Probe 63 | AGAGTGAGTAGTAGTGGAGTGTACGCCTCAGTGT |
| | | TAAAGTGCTGGAGAGTGAGTAGTAGTGGAGT |
| 74 | Encoding Probe 64 | AGAGTGAGTAGTAGTGGAGTGAGTGTTAAAGTG |
| | | CACCGGATAACAGAGTGAGTAGTAGTGGAGT |
| 75 | Encoding Probe 65 | AGAGTGAGTAGTAGTGGAGTCGGAGTGTTAAAG |
| | | TGCACCGGATTTGGGAAGAGTGAGTAGTAGTGG |
| | | AGT |
| 76 | Encoding Probe 66 | AGAGTGAGTAGTAGTGGAGTCATCAGCTAACGAT |
| | | AGTGTGAGCTAGAGTGAGTAGTAGTGGAGT |
| 77 | Encoding Probe 67 | AGAGTGAGTAGTAGTGGAGTAGTACGCCTCAGTG |
| | | TTAAAGTGGTGAGAGTGAGTAGTAGTGGAGT |
| 78 | Encoding Probe 68 | AGAGTGAGTAGTAGTGGAGTAGTTCCATGGGTAA |
| | | ACCACTTCTGGAGAGTGAGTAGTAGTGGAGT |
| 79 | Encoding Probe 69 | AGAGTGAGTAGTAGTGGAGTCGATCCGCGAGGA |
| | | TAACCCCAAGTAGAGTGAGTAGTAGTGGAGT |
| 80 | Encoding Probe 70 | AGAGTGAGTAGTAGTGGAGTTTCCTTCTCCGCGA |
| | | GGATAACAGGAGAGTGAGTAGTAGTGGAGT |
| 81 | Encoding Probe 71 | TGTGATGGAAGTTAGAGGGTGAGGCTCAGTAGTT |
| | | TTGGATGCTCATGTGATGGAAGTTAGAGGGT |
| 82 | Encoding Probe 72 | TGTGATGGAAGTTAGAGGGTAGACGCGTCACTTA |
| | | CGTGACACGGCTGTGATGGAAGTTAGAGGGT |
| 83 | Encoding Probe 73 | TGTGATGGAAGTTAGAGGGTGTGGAGGTGCTGGT |
| | | AACTAAGCTGTGTGATGGAAGTTAGAGGGT |
| 84 | Encoding Probe 74 | TGTGATGGAAGTTAGAGGGTCTAGTTTTATGGGA |
| | | TTAGCTCCAGGATGTGATGGAAGTTAGAGGGT |
| 85 | Encoding Probe 75 | TGTGATGGAAGTTAGAGGGTGAGGAAAGTTCTCA |
| | | GCATGTCTTCTGTGATGGAAGTTAGAGGGT |
| 86 | Encoding Probe 76 | TGTGATGGAAGTTAGAGGGTACACCCATGCTCGG |
| | | CACTTCTCCCTGTGATGGAAGTTAGAGGGT |
| 87 | Encoding Probe 77 | TGTGATGGAAGTTAGAGGGTCGCGGTGTTTTTCA |
| | | CACCCATACATGTGATGGAAGTTAGAGGGT |
| 88 | Encoding Probe 78 | TGTGATGGAAGTTAGAGGGTTGGCCAGAGTGATA |
| | | CATGAGGGCGTGTGATGGAAGTTAGAGGGT |
| 89 | Encoding Probe 79 | TGTGATGGAAGTTAGAGGGTTGGCTATCTCCGAG |
| | | CTTGATTTCGTGTGATGGAAGTTAGAGGGT |
| 90 | Encoding Probe 80 | TGTGATGGAAGTTAGAGGGTGGCACACAGGAAA |
| | | TTCCACCAAGGTGTGATGGAAGTTAGAGGGT |
| 91 | Encoding Probe 81 | TGTGATGGAAGTTAGAGGGTAAGATCCAACTTGC |
| | | TGAACCAGGATGTGATGGAAGTTAGAGGGT |
| 92 | Encoding Probe 82 | TGTGATGGAAGTTAGAGGGTTGCGTCACCTAACA |
| | | AGTAGGCAGGTGTGATGGAAGTTAGAGGGT |
| 93 | Encoding Probe 83 | TGTGATGGAAGTTAGAGGGTCGTGTATTAACTTA |
| | | CTGCCCTTCGAGTGTGATGGAAGTTAGAGGGT |
| 94 | Encoding Probe 84 | TGTGATGGAAGTTAGAGGGTACAAGACAAAGTTT |
| | | CTCGTGCAGGTGTGATGGAAGTTAGAGGGT |
| 95 | Encoding Probe 85 | TGTGATGGAAGTTAGAGGGTAAACTTCAAAGATC |
| | | CTTTCGCCATTGTGATGGAAGTTAGAGGGT |
| 96 | Encoding Probe 86 | TGTGATGGAAGTTAGAGGGTGCACGCTAAAATCA |
| | | ATGAAGCTATTTGTGATGGAAGTTAGAGGGT |
| 97 | Encoding Probe 87 | TGTGATGGAAGTTAGAGGGTCGATCTGATAGCGT |
| | | GAGGTCCCTTTGTGATGGAAGTTAGAGGGT |
| 98 | Encoding Probe 88 | TGTGATGGAAGTTAGAGGGTATAATTCAGTACAA |
| | | GATACCTAGGAATTGTGATGGAAGTTAGAGGGT |
| 99 | Encoding Probe 89 | TGTGATGGAAGTTAGAGGGTAGGCGCTGAATCCA |
| | | GGAGCAACGATGTGATGGAAGTTAGAGGGT |
| 100 | Encoding Probe 90 | TGTGATGGAAGTTAGAGGGTCAAAACGCTCTATG |
| | | ATCGTCAATATGTGATGGAAGTTAGAGGGT |
| 101 | Encoding Probe 91 | TGTGATGGAAGTTAGAGGGTGCAGTGTTTTTCAC |
| | | ACCCATTGTGCATGTGATGGAAGTTAGAGGGT |
| 102 | Encoding Probe 92 | TGTGATGGAAGTTAGAGGGTCTGCGATCGGTTTT |
| | | ATGGGATATCTGTGATGGAAGTTAGAGGGT |
| 103 | Encoding Probe 93 | TGTGATGGAAGTTAGAGGGTGGATCGACGTGTCT |
| | | GTCTCGCTCATGTGATGGAAGTTAGAGGGT |
| 104 | Encoding Probe 94 | TGTGATGGAAGTTAGAGGGTGGTGCAGTAACCA |
| | | GAAGTACACCTTGTGATGGAAGTTAGAGGGT |
| 105 | Encoding Probe 95 | TGTGATGGAAGTTAGAGGGTAGTTCCAACTTGCT |
| | | GAACCACGATTGTGATGGAAGTTAGAGGGT |
| 106 | Encoding Probe 96 | TGAAAGGAATGGGTTGTGGTAAAGAGATTAGCTT |
| | | AGCCTCGGCTTGAAAGGAATGGGTTGTGGT |
| 107 | Encoding Probe 97 | TGAAAGGAATGGGTTGTGGTGTCCTCACGATCTG |
| | | CCTTCGAGCGTGAAAGGAATGGGTTGTGGT |
| 108 | Encoding Probe 98 | TGAAAGGAATGGGTTGTGGTTTAACCTAAAGGTG |
| | | TACTCCAGTCTGAAAGGAATGGGTTGTGGT |
| 109 | Encoding Probe 99 | TGAAAGGAATGGGTTGTGGTTCGTTGACTCCTCT |
| | | TCAGACTATGTGAAAGGAATGGGTTGTGGT |
| 110 | Encoding Probe 100 | TGAAAGGAATGGGTTGTGGTTGAGGCTGATCGTA |
| | | TGATCAGGTGTGAAAGGAATGGGTTGTGGT |
| 111 | Encoding Probe 101 | TGAAAGGAATGGGTTGTGGTTCTAGCTTAGCCTC |
| | | GCGACTTGCGTGAAAGGAATGGGTTGTGGT |
| 112 | Encoding Probe 102 | TGAAAGGAATGGGTTGTGGTACTTTTCCAAGTCA |
| | | TTCGACTATGACTGAAAGGAATGGGTTGTGGT |
| 113 | Encoding Probe 103 | TGAAAGGAATGGGTTGTGGTGATGGGTTTTTACC |
| | | CTCTTTGACACTTGAAAGGAATGGGTTGTGGT |
| 114 | Encoding Probe 104 | TGAAAGGAATGGGTTGTGGTTGATCCAAGTCATT |
| | | CGACTATCACTTGAAAGGAATGGGTTGTGGT |
| 115 | Encoding Probe 105 | TGAAAGGAATGGGTTGTGGTATGTCAAGGGATG |
| | | AACAGTTACAGATGAAAGGAATGGGTTGTGGT |
| 116 | Encoding Probe 106 | TGAAAGGAATGGGTTGTGGTGCAAGGGATGAAC |
| | | AGTTACTCTGTATGAAAGGAATGGGTTGTGGT |
| 117 | Encoding Probe 107 | TGAAAGGAATGGGTTGTGGTAGGCTAGGTGTCTT |
| | | CCACATTTGCATGAAAGGAATGGGTTGTGGT |
| 118 | Encoding Probe 108 | TGAAAGGAATGGGTTGTGGTAGTCGACTATCTGA |
| | | AAGAACTACCTATTGAAAGGAATGGGTTGTGGT |
| 119 | Encoding Probe 109 | TGAAAGGAATGGGTTGTGGTGTAGGTTTTGATTG |
| | | TTATACGGTATATCTGAAAGGAATGGGTTGTGGT |
| 120 | Encoding Probe 110 | TGAAAGGAATGGGTTGTGGTATTTCCTATTAAAG |
| | | ATGTTGGGTAGGTGAAAGGAATGGGTTGTGGT |
| 121 | Encoding Probe 111 | TGAAAGGAATGGGTTGTGGTCGTCTCCGGTGGAA |
| | | AAAGAAGGCATGAAAGGAATGGGTTGTGGT |
| 122 | Encoding Probe 112 | TGAAAGGAATGGGTTGTGGTCAAGCATGGTTACA |
| | | GGTGTATGGATGAAAGGAATGGGTTGTGGT |
| 123 | Encoding Probe 113 | TGAAAGGAATGGGTTGTGGTTATCCTAAAGGTGT |
| | | ACTCCACTCGTGAAAGGAATGGGTTGTGGT |
| 124 | Encoding Probe 114 | TGAAAGGAATGGGTTGTGGTGGACACAGCTTGTC |
| | | CTTAAGATTTTGAAAGGAATGGGTTGTGGT |
| 125 | Encoding Probe 115 | TGAAAGGAATGGGTTGTGGTTGTTCCGATCGTCT |
| | | GCATTCCAATTGAAAGGAATGGGTTGTGGT |
| 126 | Encoding Probe 116 | TGAAAGGAATGGGTTGTGGTTCGGTCCTTAAGAA |
| | | AAGAAGCATAACTGAAAGGAATGGGTTGTGGT |
| 127 | Encoding Probe 117 | TGAAAGGAATGGGTTGTGGTCGAGACAGACATTT |
| | | CCGATCGAGATGAAAGGAATGGGTTGTGGT |
| 128 | Encoding Probe 118 | TGAAAGGAATGGGTTGTGGTGACGCTGATCGTAT |
| | | GATCAGCTGGTGAAAGGAATGGGTTGTGGT |
| 129 | Encoding Probe 119 | TGAAAGGAATGGGTTGTGGTGCCCGGGCCGCTGT |
| | | TTTCTCAGATTGAAAGGAATGGGTTGTGGT |
| 130 | Encoding Probe 120 | TGAAAGGAATGGGTTGTGGTCTTTCGGTACTATT |
| | | ATTTCCCTCAGGTGAAAGGAATGGGTTGTGGT |
| 131 | Encoding Probe 121 | TTGGAGGTGTAGGGAGTAAACCCACGATTGTTGG |
| | | TAACCTGATCGTTGGAGGTGTAGGGAGTAAA |
| 132 | Encoding Probe 122 | TTGGAGGTGTAGGGAGTAAATGGAGCATTAAGT |
| | | GACCGGATAACTTGGAGGTGTAGGGAGTAAA |
| 133 | Encoding Probe 123 | TTGGAGGTGTAGGGAGTAAACTAGCCTAATCACT |
| | | CTGCCTAGTATTGGAGGTGTAGGGAGTAAA |
| 134 | Encoding Probe 124 | TTGGAGGTGTAGGGAGTAAAGGTGCAGTTACCAC |
| | | CAGTACGGCTTTTGGAGGTGTAGGGAGTAAA |
| 135 | Encoding Probe 125 | TTGGAGGTGTAGGGAGTAAAAGCGCTACAACGTT |
| | | TCACTTCACTTTGGAGGTGTAGGGAGTAAA |
| 136 | Encoding Probe 126 | TTGGAGGTGTAGGGAGTAAAGACGTCCACATTTC |
| | | ATAGTCTCCCTGGTTGGAGGTGTAGGGAGTAAA |
| 137 | Encoding Probe 127 | TTGGAGGTGTAGGGAGTAAAAAAGTCACTCAAG |
| | | GTGACAGGGTTCTTGGAGGTGTAGGGAGTAAA |
| 138 | Encoding Probe 128 | TTGGAGGTGTAGGGAGTAAAGAACCACCTTAGTG |
| | | GTTCGTCTAGTTGGAGGTGTAGGGAGTAAA |
| 139 | Encoding Probe 129 | TTGGAGGTGTAGGGAGTAAACAAGGGTACGATT |
| | | GTTGGTAAGGATTGGAGGTGTAGGGAGTAAA |
| 140 | Encoding Probe 130 | TTGGAGGTGTAGGGAGTAAAAAGTTAGGTCACTC |
| | | AAGGTGACAGGGTTCTTGGAGGTGTAGGGAGTA |
| | | AA |
| 141 | Encoding Probe 131 | TTGGAGGTGTAGGGAGTAAAGAAGGTCACTCAA |
| | | GGTGACAGGGAAGTGATTGGAGGTGTAGGGAGT |
| | | AAA |
| 142 | Encoding Probe 132 | TTGGAGGTGTAGGGAGTAAAGAAAGTTCCCGCC |
| | | ATCACGCGGACTTGGAGGTGTAGGGAGTAAA |
| 143 | Encoding Probe 133 | TTGGAGGTGTAGGGAGTAAAGTTGACTTCACTTA |
| | | CCGCCAGGCATTGGAGGTGTAGGGAGTAAA |
| 144 | Encoding Probe 134 | TTGGAGGTGTAGGGAGTAAAGAGGCGCCTGAGT |
| | | ATTCTCTAGGATTGGAGGTGTAGGGAGTAAA |
| 145 | Encoding Probe 135 | TTGGAGGTGTAGGGAGTAAATAACCTAATCACTC |
| | | TGCCTACAACGTTGGAGGTGTAGGGAGTAAA |
| 146 | Encoding Probe 136 | TTGGAGGTGTAGGGAGTAAACCTTGCCTAATCAC |
| | | TCTGCCTTGTTTGGAGGTGTAGGGAGTAAA |
| 147 | Encoding Probe 137 | TTGGAGGTGTAGGGAGTAAACCTTGCCTAATCAC |
| | | TCTGCCTACTACTTGGAGGTGTAGGGAGTAAA |
| 148 | Encoding Probe 138 | TTGGAGGTGTAGGGAGTAAAGGAATCGCAGTTA |
| | | CCACCAGTACCCCTTGGAGGTGTAGGGAGTAAA |
| 149 | Encoding Probe 139 | TTGGAGGTGTAGGGAGTAAACGAGGCTCCGTCCG |
| | | CAAGGGAGAATTGGAGGTGTAGGGAGTAAA |
| 150 | Encoding Probe 140 | TTGGAGGTGTAGGGAGTAAACGTGGACTTCACTT |
| | | ACCGCCAGGCATTGGAGGTGTAGGGAGTAAA |
| 151 | Encoding Probe 141 | TTGGAGGTGTAGGGAGTAAACCCACGATTGTTGG |
| | | TAACCTGTTCTTGGAGGTGTAGGGAGTAAA |
| 152 | Encoding Probe 142 | TTGGAGGTGTAGGGAGTAAAGTGCAGCATTAAGT |
| | | GACCGGAAAATTGGAGGTGTAGGGAGTAAA |
| 153 | Encoding Probe 143 | TTGGAGGTGTAGGGAGTAAATAACCTAATCACTC |
| | | TGCCTACTACTTGGAGGTGTAGGGAGTAAA |
| 154 | Encoding Probe 144 | TTGGAGGTGTAGGGAGTAAAGTACAGTTACCACC |
| | | AGTACGGGTTATTGGAGGTGTAGGGAGTAAA |
| 155 | Encoding Probe 145 | TTGGAGGTGTAGGGAGTAAATAGCGCTACAACGT |
| | | TTCACTTGACTTGGAGGTGTAGGGAGTAAA |
| 156 | Encoding Probe 146 | AGGGTGTGTTTGTAAAGGGTCGTACGCAAAGCGA |
| | | AACGCTTACCAGGGTGTGTTTGTAAAGGGT |
| 157 | Encoding Probe 147 | AGGGTGTGTTTGTAAAGGGTCCATTAACCTCACT |
| | | CCCTTCCAGGAGGGTGTGTTTGTAAAGGGT |
| 158 | Encoding Probe 148 | AGGGTGTGTTTGTAAAGGGTCAGTCATGCTGTCG |
| | | TTACGCATAAAAGGGTGTGTTTGTAAAGGGT |
| 159 | Encoding Probe 149 | AGGGTGTGTTTGTAAAGGGTGTACCGGCTGTAAC |
| | | GGTTCATTAGAGGGTGTGTTTGTAAAGGGT |
| 160 | Encoding Probe 150 | AGGGTGTGTTTGTAAAGGGTAAGGACCCTTAAAG |
| | | GGTCAGGCTCAGGGTGTGTTTGTAAAGGGT |
| 161 | Encoding Probe 151 | AGGGTGTGTTTGTAAAGGGTGAAGGACCCTTAAA |
| | | GGGTCAGCCTAGGGTGTGTTTGTAAAGGGT |
| 162 | Encoding Probe 152 | AGGGTGTGTTTGTAAAGGGTGTGCAGCGTTAGTA |
| | | ACGTTCCCCTAGGGTGTGTTTGTAAAGGGT |
| 163 | Encoding Probe 153 | AGGGTGTGTTTGTAAAGGGTTTCGCTTCACCTAC |
| | | CATCAGCCACAGGGTGTGTTTGTAAAGGGT |
| 164 | Encoding Probe 154 | AGGGTGTGTTTGTAAAGGGTGTCTTAGTAACGTT |
| | | CCGGATTTTGGAGGGTGTGTTTGTAAAGGGT |
| 165 | Encoding Probe 155 | AGGGTGTGTTTGTAAAGGGTGCAGTAACGTTCCG |
| | | GATTTACGACAGGGTGTGTTTGTAAAGGGT |
| 166 | Encoding Probe 156 | AGGGTGTGTTTGTAAAGGGTGCGTTTGCGCACCA |
| | | CGCAAAGGCTAGGGTGTGTTTGTAAAGGGT |
| 167 | Encoding Probe 157 | AGGGTGTGTTTGTAAAGGGTCAACCGTCCATCAT |
| | | GCTGTCGTATGAGGGTGTGTTTGTAAAGGGT |
| 168 | Encoding Probe 158 | AGGGTGTGTTTGTAAAGGGTCGACGTTACGCATT |
| | | TTGCGCAGGTAGGGTGTGTTTGTAAAGGGT |
| 169 | Encoding Probe 159 | AGGGTGTGTTTGTAAAGGGTAGTCCTCAGCGTTA |
| | | GTAACGTTCGCCAGGGTGTGTTTGTAAAGGGT |
| 170 | Encoding Probe 160 | AGGGTGTGTTTGTAAAGGGTAACTTCCCGACCGA |
| | | ATCGCTGCGTAGGGTGTGTTTGTAAAGGGT |
| 171 | Encoding Probe 161 | AGGGTGTGTTTGTAAAGGGTACTCTCCGTTAACC |
| | | GTCCATCTACAGGGTGTGTTTGTAAAGGGT |
| 172 | Encoding Probe 162 | AGGGTGTGTTTGTAAAGGGTGGCAACCGTCCATC |
| | | ATGCTGTGCAAGGGTGTGTTTGTAAAGGGT |
| 173 | Encoding Probe 163 | AGGGTGTGTTTGTAAAGGGTGGTCCAAAACGCTC |
| | | CACTGCCACTAGGGTGTGTTTGTAAAGGGT |
| 174 | Encoding Probe 164 | AGGGTGTGTTTGTAAAGGGTGTATGCTGTCGTTA |
| | | CGCATTTTCGCAGGGTGTGTTTGTAAAGGGT |
| 175 | Encoding Probe 165 | AGGGTGTGTTTGTAAAGGGTGCAACCGTCCATCA |
| | | TGCTGTCCAAAGGGTGTGTTTGTAAAGGGT |
| 176 | Encoding Probe 166 | AGGGTGTGTTTGTAAAGGGTCGAACTGCCTGATT |
| | | TTTGACGAACAGGGTGTGTTTGTAAAGGGT |
| 177 | Encoding Probe 167 | AGGGTGTGTTTGTAAAGGGTGCGCACGCAAAGC |
| | | GAAACGCTTTCCAAGGGTGTGTTTGTAAAGGGT |
| 178 | Encoding Probe 168 | AGGGTGTGTTTGTAAAGGGTCATGTCAATGAATA |
| | | AGGTTATTAACCAGTAGGGTGTGTTTGTAAAGGG |
| | | T |
| 179 | Encoding Probe 169 | AGGGTGTGTTTGTAAAGGGTCAGTCATGCTGTCG |
| | | TTACGCAAAAAGGGTGTGTTTGTAAAGGGT |
| 180 | Encoding Probe 170 | AGGGTGTGTTTGTAAAGGGTTGTGCCGGCTGTAA |
| | | CGGTTCAATAAGGGTGTGTTTGTAAAGGGT |
| 181 | Encoding Probe 171 | AGGTTAGGTTGAGAATAGGATGGGTCGCTTAAAG |
| | | CGACAGGATAAGGTTAGGTTGAGAATAGGA |
| 182 | Encoding Probe 172 | AGGTTAGGTTGAGAATAGGAGAAGTCCGTAGAC |
| | | ATTATGCGCATAGGTTAGGTTGAGAATAGGA |
| 183 | Encoding Probe 173 | AGGTTAGGTTGAGAATAGGATGCCCCCGACCCAG |
| | | TTTATGGCGGAGGTTAGGTTGAGAATAGGA |
| 184 | Encoding Probe 174 | AGGTTAGGTTGAGAATAGGAGAAGGTCGCTTAA |
| | | AGCGACAGGCTTAGGTTAGGTTGAGAATAGGA |
| 185 | Encoding Probe 175 | AGGTTAGGTTGAGAATAGGAAAGTTAGGTCGCTT |
| | | AAAGCGACTCCAGGTTAGGTTGAGAATAGGA |
| 186 | Encoding Probe 176 | AGGTTAGGTTGAGAATAGGAGCTCAGTTTATGGG |
| | | CCTAGGTATCAGGTTAGGTTGAGAATAGGA |
| 187 | Encoding Probe 177 | AGGTTAGGTTGAGAATAGGATCCGCTTAAAGCGA |
| | | CAGGGAACTGAGGTTAGGTTGAGAATAGGA |
| 188 | Encoding Probe 178 | AGGTTAGGTTGAGAATAGGAAAGTTAGGTCGCTT |
| | | AAAGCGACAGGGTTCAGGTTAGGTTGAGAATAG |
| | | GA |
| 189 | Encoding Probe 179 | AGGTTAGGTTGAGAATAGGAGGAAGGTCGCTTA |
| | | AAGCGACAGGGAACTGAGGTTAGGTTGAGAATA |
| | | GGA |
| 190 | Encoding Probe 180 | AGGTTAGGTTGAGAATAGGAGGAAGGTCGCTTA |
| | | AAGCGACACCCAGGTTAGGTTGAGAATAGGA |
| 191 | Encoding Probe 181 | AGGTTAGGTTGAGAATAGGAAAAGTTCCCACCAT |
| | | TACGTGCACCAGGTTAGGTTGAGAATAGGA |
| 192 | Encoding Probe 182 | AGGTTAGGTTGAGAATAGGACAATTTAGGTCGCT |
| | | TAAAGCGACAGGCTTAGGTTAGGTTGAGAATAG |
| | | GA |
| 193 | Encoding Probe 183 | AGGTTAGGTTGAGAATAGGACTGAGTTTATGGGC |
| | | CTAGGTTACTTAGGTTAGGTTGAGAATAGGA |
| 194 | Encoding Probe 184 | AGGTTAGGTTGAGAATAGGAGGCCCAGTTTATGG |
| | | GCCTAGGAATAGGTTAGGTTGAGAATAGGA |
| 195 | Encoding Probe 185 | AGGTTAGGTTGAGAATAGGAGAAGGTCGCTTAA |
| | | AGCGACAGCCTAGGTTAGGTTGAGAATAGGA |
| 196 | Encoding Probe 186 | AGGTTAGGTTGAGAATAGGACCACTTAAAGCGA |
| | | CAGGGAAGTGAAGGTTAGGTTGAGAATAGGA |
| 197 | Encoding Probe 187 | AGGTTAGGTTGAGAATAGGAACTTCCCACCATTA |
| | | CGTGCTGCGTAGGTTAGGTTGAGAATAGGA |
| 198 | Encoding Probe 188 | AGGTTAGGTTGAGAATAGGAGAAGGTCGCTTAA |
| | | AGCGACAGGGAAGTGAAGGTTAGGTTGAGAATA |
| | | GGA |
| 199 | Encoding Probe 189 | AGGTTAGGTTGAGAATAGGAAATTCGCTTAAAGC |
| | | GACAGGGTTCAGGTTAGGTTGAGAATAGGA |
| 200 | Encoding Probe 190 | AGGTTAGGTTGAGAATAGGAAACTTCCCACCATT |
| | | ACGTGCTCCGAGGTTAGGTTGAGAATAGGA |
| 201 | Encoding Probe 191 | AGGTTAGGTTGAGAATAGGAGGAACCCAGTTTAT |
| | | GGGCCTACCAAGGTTAGGTTGAGAATAGGA |
| 202 | Encoding Probe 192 | AGGTTAGGTTGAGAATAGGAAAAGTCGCTTAAA |
| | | GCGACAGGGTTCAGGTTAGGTTGAGAATAGGA |
| 203 | Encoding Probe 193 | AGGTTAGGTTGAGAATAGGACAGCGACCCAGTTT |
| | | ATGGGCCTAGCAAAGGTTAGGTTGAGAATAGGA |
| 204 | Encoding Probe 194 | AGGTTAGGTTGAGAATAGGACTGAGTTTATGGGC |
| | | CTAGGTTTCTAGGTTAGGTTGAGAATAGGA |
| 205 | Encoding Probe 195 | AGGTTAGGTTGAGAATAGGAGCTCAGTTTATGGG |
| | | CCTAGGTTACTTAGGTTAGGTTGAGAATAGGA |
| 206 | Encoding Probe 196 | TAGAGTTGATAGAGGGAGAACGAATGAGTAAAT |
| | | CACTTCACCTAGTATAGAGTTGATAGAGGGAGAA |
| 207 | Encoding Probe 197 | TAGAGTTGATAGAGGGAGAAGGATTCGCTTCATT |
| | | ACGCTATGTAAAGTAGAGTTGATAGAGGGAGAA |
| 208 | Encoding Probe 198 | TAGAGTTGATAGAGGGAGAATGTTCAGCGTTAAA |
| | | AAGGTACCGCTATAGAGTTGATAGAGGGAGAA |
| 209 | Encoding Probe 199 | TAGAGTTGATAGAGGGAGAACCAGCTTCATTACG |
| | | CTATGTATTGTGTAGAGTTGATAGAGGGAGAA |
| 210 | Encoding Probe 200 | TAGAGTTGATAGAGGGAGAATGTTCAGCGTTAAA |
| | | AAGGTACCCCTTAGAGTTGATAGAGGGAGAA |
| 211 | Encoding Probe 201 | TAGAGTTGATAGAGGGAGAAGCCCGCTTCATTAC |
| | | GCTATGTAAAGTAGAGTTGATAGAGGGAGAA |
| 212 | Encoding Probe 202 | TAGAGTTGATAGAGGGAGAAGCGCCCGGGTAAC |
| | | GGGTCCACGAATTAGAGTTGATAGAGGGAGAA |
| 213 | Encoding Probe 203 | TAGAGTTGATAGAGGGAGAAGTGCAGCGTTAAA |
| | | AAGGTACCGCTATAGAGTTGATAGAGGGAGAA |
| 214 | Encoding Probe 204 | TAGAGTTGATAGAGGGAGAAGGATTCGCTTCATT |
| | | ACGCTATGATATAGAGTTGATAGAGGGAGAA |
| 215 | Encoding Probe 205 | TAGAGTTGATAGAGGGAGAAGCGCCCGGGTAAC |
| | | GGGTCCACCAATAGAGTTGATAGAGGGAGAA |
| 216 | Encoding Probe 206 | TAGAGTTGATAGAGGGAGAATGGAGCGTTAAAA |
| | | AGGTACCGCTATAGAGTTGATAGAGGGAGAA |
| 217 | Encoding Probe 207 | TAGAGTTGATAGAGGGAGAAGGAGTTCGCTTCAT |
| | | TACGCTATGTAAAGTAGAGTTGATAGAGGGAGA |
| | | A |
| 218 | Encoding Probe 208 | TAGAGTTGATAGAGGGAGAAGGCTCGCTTCATTA |
| | | CGCTATGTATAGTTAGAGTTGATAGAGGGAGAA |
| 219 | Encoding Probe 209 | TAGAGTTGATAGAGGGAGAACGTCCGGGTAACG |
| | | GGTCCACGAATTAGAGTTGATAGAGGGAGAA |
| 220 | Encoding Probe 210 | TAGAGTTGATAGAGGGAGAAAATTCAATGTATCG |
| | | CTACACTTTGTTAGAGTTGATAGAGGGAGAA |
| 221 | Encoding Probe 211 | TAGAGTTGATAGAGGGAGAACGAATGAGTAAAT |
| | | CACTTCACCTTGTTAGAGTTGATAGAGGGAGAA |
| 222 | Encoding Probe 212 | TAGAGTTGATAGAGGGAGAAGTGCAGCGTTAAA |
| | | AAGGTACCCCTTAGAGTTGATAGAGGGAGAA |
| 223 | Encoding Probe 213 | TAGAGTTGATAGAGGGAGAAGGCTCGCTTCATTA |
| | | CGCTATGTTAATAGAGTTGATAGAGGGAGAA |
| 224 | Encoding Probe 214 | TAGAGTTGATAGAGGGAGAAGAGGCATACCTCA |
| | | CGATACACGAATAGAGTTGATAGAGGGAGAA |
| 225 | Encoding Probe 215 | TAGAGTTGATAGAGGGAGAAGGAGTTCGCTTCAT |
| | | TACGCTATGTTAATAGAGTTGATAGAGGGAGAA |
| 226 | Encoding Probe 216 | TAGAGTTGATAGAGGGAGAAGGATTCGCTTCATT |
| | | ACGCTATGTATTGTGTAGAGTTGATAGAGGGAGA |
| | | A |
| 227 | Encoding Probe 217 | TAGAGTTGATAGAGGGAGAAGGAGTTCGCTTCAT |
| | | TACGCTATCATTAGAGTTGATAGAGGGAGAA |
| 228 | Encoding Probe 218 | TAGAGTTGATAGAGGGAGAAGCCCGCTTCATTAC |
| | | GCTATGTATTGTGTAGAGTTGATAGAGGGAGAA |
| 229 | Encoding Probe 219 | TAGAGTTGATAGAGGGAGAAGGCTCGCTTCATTA |
| | | CGCTATGTATTGTGTAGAGTTGATAGAGGGAGAA |
| 230 | Encoding Probe 220 | TAGAGTTGATAGAGGGAGAAGGCTCGCTTCATTA |
| | | CGCTATGTAAAGTAGAGTTGATAGAGGGAGAA |
| 231 | Encoding Probe 221 | GATGATGTAGTAGTAAGGGTACCTCTTCGACTGG |
| | | TCTCAGCAGGGATGATGTAGTAGTAAGGGT |
| 232 | Encoding Probe 222 | GATGATGTAGTAGTAAGGGTTGCAATCGATGAGG |
| | | TTATTAACCTGTAGATGATGTAGTAGTAAGGGT |
| 233 | Encoding Probe 223 | GATGATGTAGTAGTAAGGGTCATCAGTCACACCC |
| | | GAAGGTGCTAGGGATGATGTAGTAGTAAGGGT |
| 234 | Encoding Probe 224 | GATGATGTAGTAGTAAGGGTGCAATCGATGAGGT |
| | | TATTAACCTGTAGATGATGTAGTAGTAAGGGT |
| 235 | Encoding Probe 225 | GATGATGTAGTAGTAAGGGTCATCAGTCACACCC |
| | | GAAGGTGCAGGGATGATGTAGTAGTAAGGGT |
| 236 | Encoding Probe 226 | GATGATGTAGTAGTAAGGGTATGAGTCACACCCG |
| | | AAGGTGCTAGGGATGATGTAGTAGTAAGGGT |
| 237 | Encoding Probe 227 | GATGATGTAGTAGTAAGGGTTCCCTTCACCTACA |
| | | CACCAGCGACGGATGATGTAGTAGTAAGGGT |
| 238 | Encoding Probe 228 | GATGATGTAGTAGTAAGGGTTCCCTTCACCTACA |
| | | CACCAGCCACGATGATGTAGTAGTAAGGGT |
| 239 | Encoding Probe 229 | GATGATGTAGTAGTAAGGGTTGACCGCAACCCCG |
| | | GTGAGGGCGGGATGATGTAGTAGTAAGGGT |
| 240 | Encoding Probe 230 | GATGATGTAGTAGTAAGGGTAGAGACTGGTCTCA |
| | | GCTCCACGGCGATGATGTAGTAGTAAGGGT |
| 241 | Encoding Probe 231 | GATGATGTAGTAGTAAGGGTATGAGTCACACCCG |
| | | AAGGTGCAGGGATGATGTAGTAGTAAGGGT |
| 242 | Encoding Probe 232 | GATGATGTAGTAGTAAGGGTTGCGTCACACCCGA |
| | | AGGTGCTAGGGATGATGTAGTAGTAAGGGT |
| 243 | Encoding Probe 233 | GATGATGTAGTAGTAAGGGTGTGCTCAGCCTTGA |
| | | TTATCCGCTAGATGATGTAGTAGTAAGGGT |
| 244 | Encoding Probe 234 | GATGATGTAGTAGTAAGGGTCCACGTCAATCGAT |
| | | GAGGTTAAATGATGATGTAGTAGTAAGGGT |
| 245 | Encoding Probe 235 | GATGATGTAGTAGTAAGGGTAATAACCTCATCGC |
| | | CTTCCTCAGGGATGATGTAGTAGTAAGGGT |
| 246 | Encoding Probe 236 | GATGATGTAGTAGTAAGGGTCCCACGTCAATCGA |
| | | TGAGGTTTAAGATGATGTAGTAGTAAGGGT |
| 247 | Encoding Probe 237 | GATGATGTAGTAGTAAGGGTCATCAGTCACACCC |
| | | GAAGGTGGAGGATGATGTAGTAGTAAGGGT |
| 248 | Encoding Probe 238 | GATGATGTAGTAGTAAGGGTCCCTTCACCTACAC |
| | | ACCAGCGACGGATGATGTAGTAGTAAGGGT |
| 249 | Encoding Probe 239 | ATAGGAAATGGTGGTAGTGTCTACCGACCGTGAT |
| | | TAGCTAAGGATGTGGAGGGATTGAAGGATA |
| 250 | Encoding Probe 240 | ATAGGAAATGGTGGTAGTGTCAACTGGAGCTTAG |
| | | AGGATTTTGGATGTGGAGGGATTGAAGGATA |
| 251 | Encoding Probe 241 | ATAGGAAATGGTGGTAGTGTCCCTTAAAGGCCCA |
| | | GGGAAGAGAGTGTGGAGGGATTGAAGGATA |
| 252 | Encoding Probe 242 | ATAGGAAATGGTGGTAGTGTAAGCGCTTATCTTT |
| | | TCCGCACAATTGTGGAGGGATTGAAGGATA |
| 253 | Encoding Probe 243 | ATAGGAAATGGTGGTAGTGTCCCTTCACCTACAT |
| | | GCCAGCGACGTGTGGAGGGATTGAAGGATA |
| 254 | Encoding Probe 244 | ATAGGAAATGGTGGTAGTGTCTGTGTCCTCACCC |
| | | CAGATTAACCTGTGGAGGGATTGAAGGATA |
| 255 | Encoding Probe 245 | ATAGGAAATGGTGGTAGTGTATGTTTAATGTTAC |
| | | CTGGAGCTATCTGTGGAGGGATTGAAGGATA |
| 256 | Encoding Probe 246 | ATAGGAAATGGTGGTAGTGTTCCATCAACTACTT |
| | | CTGCACCGATCTGTGGAGGGATTGAAGGATA |
| 257 | Encoding Probe 247 | ATAGGAAATGGTGGTAGTGTGCGCAGGGTTGATA |
| | | TGCAACCCCTTGTGGAGGGATTGAAGGATA |
| 258 | Encoding Probe 248 | ATAGGAAATGGTGGTAGTGTGATCAACAACGCTA |
| | | AGCGTCGGACTGTGGAGGGATTGAAGGATA |
| 259 | Encoding Probe 249 | ATAGGAAATGGTGGTAGTGTAGTTCCATCCGCGA |
| | | GGGACTTGTGTGTGGAGGGATTGAAGGATA |
| 260 | Encoding Probe 250 | ATAGGAAATGGTGGTAGTGTTAATGAACGTATTA |
| | | AGCTCACCTGGTGTGGAGGGATTGAAGGATA |
| 261 | Encoding Probe 251 | ATAGGAAATGGTGGTAGTGTGTCCATCAACTACT |
| | | TCTGCACCGATCTGTGGAGGGATTGAAGGATA |
| 262 | Encoding Probe 252 | ATAGGAAATGGTGGTAGTGTATACCCTTTGCTGC |
| | | GCGACTTAGGTGTGGAGGGATTGAAGGATA |
| 263 | Encoding Probe 253 | ATAGGAAATGGTGGTAGTGTCAGTACCTTGCAAC |
| | | TAATCGCGGTTGTGGAGGGATTGAAGGATA |
| 264 | Encoding Probe 254 | ATAGGAAATGGTGGTAGTGTCAGTTGATGAACGT |
| | | ATTAAGCTCAGGTTGTGGAGGGATTGAAGGATA |
| 265 | Encoding Probe 255 | ATAGGAAATGGTGGTAGTGTTATCAGACAGGATG |
| | | TCACGTGAGGTGTGGAGGGATTGAAGGATA |
| 266 | Encoding Probe 256 | ATAGGAAATGGTGGTAGTGTGATCATCGAACTCA |
| | | CGACCTGTCGTTGTGGAGGGATTGAAGGATA |
| 267 | Encoding Probe 257 | ATAGGAAATGGTGGTAGTGTTGTAGCCGATTCAG |
| | | GTTCTGGCGATGTGGAGGGATTGAAGGATA |
| 268 | Encoding Probe 258 | ATAGGAAATGGTGGTAGTGTATAATTCATGACAT |
| | | GATAATGTGTGCTTGTGGAGGGATTGAAGGATA |
| 269 | Encoding Probe 259 | ATAGGAAATGGTGGTAGTGTATAGGCAGTGTCCT |
| | | ACTCTCGGTATGTGGAGGGATTGAAGGATA |
| 270 | Encoding Probe 260 | ATAGGAAATGGTGGTAGTGTAATGGGCCGAGTTA |
| | | GAACATCTTTTGTGGAGGGATTGAAGGATA |
| 271 | Encoding Probe 261 | ATAGGAAATGGTGGTAGTGTAAAGCGCTTATCTT |
| | | TTCCGCAGAATGTGGAGGGATTGAAGGATA |
| 272 | Encoding Probe 262 | ATAGGAAATGGTGGTAGTGTAAAGGGCCTTAAA |
| | | GGCCCAGGCTTTGTGGAGGGATTGAAGGATA |
| 273 | Encoding Probe 263 | ATAGGAAATGGTGGTAGTGTTCCCCTTAAAGGCC |
| | | CAGGGAACTGTGTGGAGGGATTGAAGGATA |
| 274 | Encoding Probe 264 | AGAGTGAGTAGTAGTGGAGTCCCCGATTCCTGTG |
| | | TAACTGAAGGAATGTGGAGGGATTGAAGGATA |
| 275 | Encoding Probe 265 | AGAGTGAGTAGTAGTGGAGTGGACACGTATACA |
| | | AAGTATACATCCCGTTGTGGAGGGATTGAAGGAT |
| | | A |
| 276 | Encoding Probe 266 | AGAGTGAGTAGTAGTGGAGTACGGCAAGTAAGG |
| | | AAAAGGGTACGTGTGGAGGGATTGAAGGATA |
| 277 | Encoding Probe 267 | AGAGTGAGTAGTAGTGGAGTACGCACCTGTATCT |
| | | AGATTCCCGTTCTGTGGAGGGATTGAAGGATA |
| 278 | Encoding Probe 268 | AGAGTGAGTAGTAGTGGAGTACCGTCTGGATTGT |
| | | TTTCCTCTACTTGTGGAGGGATTGAAGGATA |
| 279 | Encoding Probe 269 | AGAGTGAGTAGTAGTGGAGTAGACGGATAGTAC |
| | | TCATAGGTATTGCCTGTGGAGGGATTGAAGGATA |
| 280 | Encoding Probe 270 | AGAGTGAGTAGTAGTGGAGTGAAAGTTCCCATCC |
| | | GAAATGCTGCGTTGTGGAGGGATTGAAGGATA |
| 281 | Encoding Probe 271 | AGAGTGAGTAGTAGTGGAGTCGAGCCACTAAAG |
| | | CCTCAAAGGAGGTGTGGAGGGATTGAAGGATA |
| 282 | Encoding Probe 272 | AGAGTGAGTAGTAGTGGAGTGAGCGTCAGTATTA |
| | | GGCCAGATGGGACTGTGGAGGGATTGAAGGATA |
| 283 | Encoding Probe 273 | AGAGTGAGTAGTAGTGGAGTTGGGAATTCTACCA |
| | | TCCTCTCCGTATGTGGAGGGATTGAAGGATA |
| 284 | Encoding Probe 274 | AGAGTGAGTAGTAGTGGAGTGGTCTCTCCCATAC |
| | | TCTAGCTGTGTGTGGAGGGATTGAAGGATA |
| 285 | Encoding Probe 275 | AGAGTGAGTAGTAGTGGAGTTCCGTTCACTCTTG |
| | | CTATGGTGCGTGTGGAGGGATTGAAGGATA |
| 286 | Encoding Probe 276 | AGAGTGAGTAGTAGTGGAGTGGATATTCAGACA |
| | | AGGTTTCACGTCGGTGTGGAGGGATTGAAGGATA |
| 287 | Encoding Probe 277 | AGAGTGAGTAGTAGTGGAGTAGAGTATTAACTA |
| | | AAGTAGCCTCCAGGTGTGGAGGGATTGAAGGAT |
| | | A |
| 288 | Encoding Probe 278 | AGAGTGAGTAGTAGTGGAGTGTATCAGACAAGG |
| | | TTTCACGTCGGTGTGGAGGGATTGAAGGATA |
| 289 | Encoding Probe 279 | AGAGTGAGTAGTAGTGGAGTTGATCATCATTATG |
| | | TGTGCCCAAATGTGGAGGGATTGAAGGATA |
| 290 | Encoding Probe 280 | AGAGTGAGTAGTAGTGGAGTAGATAAAACACAC |
| | | ATAACTTAATGGGAACTGTGGAGGGATTGAAGG |
| | | ATA |
| 291 | Encoding Probe 281 | AGAGTGAGTAGTAGTGGAGTGAAGCTCATCTATT |
| | | AGCGCAACCATGTGGAGGGATTGAAGGATA |
| 292 | Encoding Probe 282 | AGAGTGAGTAGTAGTGGAGTATAATTCATGTTGC |
| | | AATACCTACGAATGTGGAGGGATTGAAGGATA |
| 293 | Encoding Probe 283 | AGAGTGAGTAGTAGTGGAGTCAGCCGCTAGGTCC |
| | | GGTAGCAACGATGTGGAGGGATTGAAGGATA |
| 294 | Encoding Probe 284 | AGAGTGAGTAGTAGTGGAGTGTCGGTTCACTCTT |
| | | GCTATGGAGCTGTGGAGGGATTGAAGGATA |
| 295 | Encoding Probe 285 | AGAGTGAGTAGTAGTGGAGTAAAGATTAGCATC |
| | | ACATCGCTCACTGTGGAGGGATTGAAGGATA |
| 296 | Encoding Probe 286 | AGAGTGAGTAGTAGTGGAGTTAAGACTCGATTTC |
| | | TCTACGGGAGTGTGGAGGGATTGAAGGATA |
| 297 | Encoding Probe 287 | AGAGTGAGTAGTAGTGGAGTGGCCTCTTTGCAGT |
| | | TAGGCTAGGATTGTGGAGGGATTGAAGGATA |
| 298 | Encoding Probe 288 | AGAGTGAGTAGTAGTGGAGTTCTTCAGCATAGAG |
| | | TACCCCGCTATGTGGAGGGATTGAAGGATA |
| 299 | Encoding Probe 289 | AGAGTGAGTAGTAGTGGAGTAGGTCGTCTGGTTT |
| | | AGTTAGCGATATAGGAAATGGTGGTAGTGT |
| 300 | Encoding Probe 290 | AGAGTGAGTAGTAGTGGAGTGGAATCACTATATA |
| | | CTCTAGTACAGGTTAATAGGAAATGGTGGTAGTG |
| | | T |
| 301 | Encoding Probe 291 | AGAGTGAGTAGTAGTGGAGTCCGCCCGTTATCAT |
| | | AGGCTCCATGATAGGAAATGGTGGTAGTGT |
| 302 | Encoding Probe 292 | AGAGTGAGTAGTAGTGGAGTAGGACTGAGATTG |
| | | GCTTTAAGACTAATAGGAAATGGTGGTAGTGT |
| 303 | Encoding Probe 293 | AGAGTGAGTAGTAGTGGAGTAAAGGTCTACAAC |
| | | ATGATACTATGCGCATAGGAAATGGTGGTAGTGT |
| 304 | Encoding Probe 294 | AGAGTGAGTAGTAGTGGAGTAGGCCATGACACTT |
| | | TTGTGTCTAGATAGGAAATGGTGGTAGTGT |
| 305 | Encoding Probe 295 | AGAGTGAGTAGTAGTGGAGTTACACTTTTGTGTC |
| | | ATCCACACGAATAGGAAATGGTGGTAGTGT |
| 306 | Encoding Probe 296 | AGAGTGAGTAGTAGTGGAGTTGCCTCTTTGAATG |
| | | AATAGCTGCAAGATAGGAAATGGTGGTAGTGT |
| 307 | Encoding Probe 297 | AGAGTGAGTAGTAGTGGAGTACGCGAAGAGAAA |
| | | GCCTATCTCATCATAGGAAATGGTGGTAGTGT |
| 308 | Encoding Probe 298 | AGAGTGAGTAGTAGTGGAGTTTATCTGGTTTAGT |
| | | TAGCCTACACGATAGGAAATGGTGGTAGTGT |
| 309 | Encoding Probe 299 | AGAGTGAGTAGTAGTGGAGTCCTTTATCTGAGAT |
| | | TGGTAATCCGCCTATAGGAAATGGTGGTAGTGT |
| 310 | Encoding Probe 300 | AGAGTGAGTAGTAGTGGAGTGATTCCAAGAGAC |
| | | TTAACATCGACCGAATAGGAAATGGTGGTAGTGT |
| 311 | Encoding Probe 301 | AGAGTGAGTAGTAGTGGAGTGGTAGTCATCCAA |
| | | GCACTTTTGTTATAGGAAATGGTGGTAGTGT |
| 312 | Encoding Probe 302 | AGAGTGAGTAGTAGTGGAGTGGAAAGTCATCCA |
| | | AGCACTTTAGTATAGGAAATGGTGGTAGTGT |
| 313 | Encoding Probe 303 | AGAGTGAGTAGTAGTGGAGTAAAAAAGCGTACA |
| | | ATGGTTAAGGGTATAGGAAATGGTGGTAGTGT |
| 314 | Encoding Probe 304 | AGAGTGAGTAGTAGTGGAGTAAGGCGTTCTAGG |
| | | GCTTAACTAGAATAGGAAATGGTGGTAGTGT |
| 315 | Encoding Probe 305 | AGAGTGAGTAGTAGTGGAGTTAACGGGCTCGAA |
| | | CTTGTTGTTCCATAGGAAATGGTGGTAGTGT |
| 316 | Encoding Probe 306 | AGAGTGAGTAGTAGTGGAGTAATGTCACTTGGTA |
| | | GATTTTCCAGAGATAGGAAATGGTGGTAGTGT |
| 317 | Encoding Probe 307 | AGAGTGAGTAGTAGTGGAGTGGTCCTACCAACGT |
| | | TCTTCTCATTATAGGAAATGGTGGTAGTGT |
| 318 | Encoding Probe 308 | AGAGTGAGTAGTAGTGGAGTCTATGCTAAGGTTA |
| | | ATCTATCATTTTTTTATAGGAAATGGTGGTAGTGT |
| 319 | Encoding Probe 309 | AGAGTGAGTAGTAGTGGAGTGGACCAGGTAATT |
| | | CTTCTATAATGATATTATAGGAAATGGTGGTAGT |
| | | GT |
| 320 | Encoding Probe 310 | AGAGTGAGTAGTAGTGGAGTGTTCCGAAGTGTAA |
| | | ACACTTCCCAATAGGAAATGGTGGTAGTGT |
| 321 | Encoding Probe 311 | AGAGTGAGTAGTAGTGGAGTGTTCATCAGTCTAG |
| | | TGTAAACACGTTATAGGAAATGGTGGTAGTGT |
| 322 | Encoding Probe 312 | AGAGTGAGTAGTAGTGGAGTCTAGGATACTAGTC |
| | | ATTAACTAGTGCCAATAGGAAATGGTGGTAGTGT |
| 323 | Encoding Probe 313 | AGAGTGAGTAGTAGTGGAGTCGTTCATCAGTCTA |
| | | GTGTAAACACGTTATAGGAAATGGTGGTAGTGT |
| 324 | Encoding Probe 314 | TGTGATGGAAGTTAGAGGGTGTACTTGGACATGC |
| | | ACTTCCAATGCGTGTGGAGGGATTGAAGGATA |
| 325 | Encoding Probe 315 | TGTGATGGAAGTTAGAGGGTAGTCTTATGCCATG |
| | | CGGCATATTGTGTGGAGGGATTGAAGGATA |
| 326 | Encoding Probe 316 | TGTGATGGAAGTTAGAGGGTAGGCCACTACACCT |
| | | AATGGTGATCTGTGGAGGGATTGAAGGATA |
| 327 | Encoding Probe 317 | TGTGATGGAAGTTAGAGGGTGATCCTAATGGTGT |
| | | AGTCCACTCGTGTGGAGGGATTGAAGGATA |
| 328 | Encoding Probe 318 | TGTGATGGAAGTTAGAGGGTGATGTTCCGGTCTC |
| | | ATCGGCTGGATGTGGAGGGATTGAAGGATA |
| 329 | Encoding Probe 319 | TGTGATGGAAGTTAGAGGGTGGACACTCTTATGC |
| | | CATGCGGCTATTGTGGAGGGATTGAAGGATA |
| 330 | Encoding Probe 320 | TGTGATGGAAGTTAGAGGGTTCATTAATGCGTTT |
| | | GCTGCAGGTGTGTGGAGGGATTGAAGGATA |
| 331 | Encoding Probe 321 | TGTGATGGAAGTTAGAGGGTCCCTTTCACCCTCT |
| | | TTAGCGGTTATGTGGAGGGATTGAAGGATA |
| 332 | Encoding Probe 322 | TGTGATGGAAGTTAGAGGGTATGCTACATACTTA |
| | | TTCGCCCTTAATGTGGAGGGATTGAAGGATA |
| 333 | Encoding Probe 323 | TGTGATGGAAGTTAGAGGGTGTGCATCACTCATT |
| | | AACGAGCAAATGTGGAGGGATTGAAGGATA |
| 334 | Encoding Probe 324 | TGTGATGGAAGTTAGAGGGTCAAGGGACGTTCA |
| | | GTTACTAAACATGTGGAGGGATTGAAGGATA |
| 335 | Encoding Probe 325 | TGTGATGGAAGTTAGAGGGTTCCACGTTCAGTTA |
| | | CTAACGTGGATGTGGAGGGATTGAAGGATA |
| 336 | Encoding Probe 326 | TGTGATGGAAGTTAGAGGGTTAGCCTAGGTGTTG |
| | | TCAGCATAAGTGTGGAGGGATTGAAGGATA |
| 337 | Encoding Probe 327 | TGTGATGGAAGTTAGAGGGTTAGTCAACTATACT |
| | | AACAGACTACCTATTGTGGAGGGATTGAAGGATA |
| 338 | Encoding Probe 328 | TGTGATGGAAGTTAGAGGGTTCCACGTTCAGTTA |
| | | CTAACGTCGAATGTGGAGGGATTGAAGGATA |
| 339 | Encoding Probe 329 | TGTGATGGAAGTTAGAGGGTGGTCGGCATAAACT |
| | | GTTATGCCCATGTGGAGGGATTGAAGGATA |
| 340 | Encoding Probe 330 | TGTGATGGAAGTTAGAGGGTCGAGTATTCACTGA |
| | | AAAGTAATATCCATATGTGGAGGGATTGAAGGAT |
| | | A |
| 341 | Encoding Probe 331 | TGTGATGGAAGTTAGAGGGTGAGCTTTCCAATTG |
| | | AGTGCAACGTTGTGGAGGGATTGAAGGATA |
| 342 | Encoding Probe 332 | TGTGATGGAAGTTAGAGGGTCATGCATTTAACTC |
| | | TACTCAAGACTGTATGTGGAGGGATTGAAGGATA |
| 343 | Encoding Probe 333 | TGTGATGGAAGTTAGAGGGTCTTTCGCTACTATT |
| | | ATTTCGCTAGGTGTGGAGGGATTGAAGGATA |
| 344 | Encoding Probe 334 | TGTGATGGAAGTTAGAGGGTCCAGGGCAGTTGTT |
| | | TTCTCACATCTGTGGAGGGATTGAAGGATA |
| 345 | Encoding Probe 335 | TGTGATGGAAGTTAGAGGGTGACGCTGACCGAA |
| | | GTCAGCACAGGTGTGGAGGGATTGAAGGATA |
| 346 | Encoding Probe 336 | TGTGATGGAAGTTAGAGGGTGATACTAGCCTTCC |
| | | ACTTCCAAGGATGTGGAGGGATTGAAGGATA |
| 347 | Encoding Probe 337 | TGTGATGGAAGTTAGAGGGTACCCTTCAATTCTG |
| | | AGCTTCGGGCTGTGGAGGGATTGAAGGATA |
| 348 | Encoding Probe 338 | TGTGATGGAAGTTAGAGGGTCAGCTCCAACTATC |
| | | ACTAGCCTTGGTTGTGGAGGGATTGAAGGATA |
| 349 | Encoding Probe 339 | TGTGATGGAAGTTAGAGGGTCCTCAGTTAATGAT |
| | | AGTGTGTCGATTGATAGGAAATGGTGGTAGTGT |
| 350 | Encoding Probe 340 | TGTGATGGAAGTTAGAGGGTGGAGCCTTGGTTTT |
| | | CCGGATTACGATAGGAAATGGTGGTAGTGT |
| 351 | Encoding Probe 341 | TGTGATGGAAGTTAGAGGGTGTGTCTCATCTCTG |
| | | AAAACTTCCCACATAGGAAATGGTGGTAGTGT |
| 352 | Encoding Probe 342 | TGTGATGGAAGTTAGAGGGTGTCACCCCATTAAG |
| | | AGGCTCCGTGATAGGAAATGGTGGTAGTGT |
| 353 | Encoding Probe 343 | TGTGATGGAAGTTAGAGGGTCCACGTCAATGAGC |
| | | AAAGGTAAATATAGGAAATGGTGGTAGTGT |
| 354 | Encoding Probe 344 | TGTGATGGAAGTTAGAGGGTGTAAGCTCACAATA |
| | | TGTGCATAAAATAGGAAATGGTGGTAGTGT |
| 355 | Encoding Probe 345 | TGTGATGGAAGTTAGAGGGTGATACACACACTGA |
| | | TTCAGGCAGAATAGGAAATGGTGGTAGTGT |
| 356 | Encoding Probe 346 | TGTGATGGAAGTTAGAGGGTAGTCTTGGTTTTCC |
| | | GGATTTGGGAATAGGAAATGGTGGTAGTGT |
| 357 | Encoding Probe 347 | TGTGATGGAAGTTAGAGGGTACCTCAGTTAATGA |
| | | TAGTGTGTCGTTTATAGGAAATGGTGGTAGTGT |
| 358 | Encoding Probe 348 | TGTGATGGAAGTTAGAGGGTGAGCCTTGGTTTTC |
| | | CGGATTTCGGATAGGAAATGGTGGTAGTGT |
| 359 | Encoding Probe 349 | TGTGATGGAAGTTAGAGGGTGTATCATCTCTGAA |
| | | AACTTCCGACCATAGGAAATGGTGGTAGTGT |
| 360 | Encoding Probe 350 | TGTGATGGAAGTTAGAGGGTGTGCTCAGCCTTGG |
| | | TTTTCCGCTAATAGGAAATGGTGGTAGTGT |
| 361 | Encoding Probe 351 | TGTGATGGAAGTTAGAGGGTTGCGTCACCCCATT |
| | | AAGAGGCAGGATAGGAAATGGTGGTAGTGT |
| 362 | Encoding Probe 352 | TGTGATGGAAGTTAGAGGGTCATGTCAATGAGCA |
| | | AAGGTATTAAGAAATAGGAAATGGTGGTAGTGT |
| 363 | Encoding Probe 353 | TGTGATGGAAGTTAGAGGGTGTAAGCTCACAATA |
| | | TGTGCATTAAAATAGGAAATGGTGGTAGTGT |
| 364 | Encoding Probe 354 | TGTGATGGAAGTTAGAGGGTGAAACTAACACAC |
| | | ACACTGATTGTCATAGGAAATGGTGGTAGTGT |
| 365 | Encoding Probe 355 | TGTGATGGAAGTTAGAGGGTCTAAGTTAATGATA |
| | | GTGTGTCGATTGATAGGAAATGGTGGTAGTGT |
| 366 | Encoding Probe 356 | TGTGATGGAAGTTAGAGGGTGTGTCTCATCTCTG |
| | | AAAACTTCCGACCATAGGAAATGGTGGTAGTGT |
| 367 | Encoding Probe 357 | TGTGATGGAAGTTAGAGGGTAGGAAGGCACATT |
| | | CTCATCTCACTATAGGAAATGGTGGTAGTGT |
| 368 | Encoding Probe 358 | TGTGATGGAAGTTAGAGGGTCGTCACCCCATTAA |
| | | GAGGCTCGGTATAGGAAATGGTGGTAGTGT |
| 369 | Encoding Probe 359 | TGTGATGGAAGTTAGAGGGTGCGTCACCCCATTA |
| | | AGAGGCTAGGATAGGAAATGGTGGTAGTGT |
| 370 | Encoding Probe 360 | TGTGATGGAAGTTAGAGGGTCATGTCAATGAGCA |
| | | AAGGTATTATGAATAGGAAATGGTGGTAGTGT |
| 371 | Encoding Probe 361 | TGTGATGGAAGTTAGAGGGTTAGGCTCACAATAT |
| | | GTGCATTAAAATAGGAAATGGTGGTAGTGT |
| 372 | Encoding Probe 362 | TGTGATGGAAGTTAGAGGGTTGACACACACACTG |
| | | ATTCAGGGAGATAGGAAATGGTGGTAGTGT |
| 373 | Encoding Probe 363 | TGTGATGGAAGTTAGAGGGTCCTCAGTTAATGAT |
| | | AGTGTGTCGTTTATAGGAAATGGTGGTAGTGT |
| 374 | Encoding Probe 364 | TGTGATGGAAGTTAGAGGGTGTTGTGAACAAACT |
| | | TTCGACTACTCCAGAGTGAGTAGTAGTGGAGT |
| 375 | Encoding Probe 365 | TGTGATGGAAGTTAGAGGGTGGACGCTTAAAAC |
| | | GAATAATGGTGGATGAGAGTGAGTAGTAGTGGA |
| | | GT |
| 376 | Encoding Probe 366 | TGTGATGGAAGTTAGAGGGTGTACTTAAAACGAA |
| | | TAATGGTGGTAGTCAGAGTGAGTAGTAGTGGAGT |
| 377 | Encoding Probe 367 | TGTGATGGAAGTTAGAGGGTGGTGTCCTTACGGA |
| | | CAATCCAGTCAGAGTGAGTAGTAGTGGAGT |
| 378 | Encoding Probe 368 | TGTGATGGAAGTTAGAGGGTCAGACTCTTGCGGA |
| | | ACGTAAGAGGAGAGTGAGTAGTAGTGGAGT |
| 379 | Encoding Probe 369 | TGTGATGGAAGTTAGAGGGTTTGCTCGAGGAAAC |
| | | AATTTCCAGAAGAGTGAGTAGTAGTGGAGT |
| 380 | Encoding Probe 370 | TGTGATGGAAGTTAGAGGGTCGACTCCATAAATG |
| | | GTTACTCCACGCCAGAGTGAGTAGTAGTGGAGT |
| 381 | Encoding Probe 371 | TGTGATGGAAGTTAGAGGGTTAACCTAACACTCA |
| | | ATCTCACTGCTTCCTAGAGTGAGTAGTAGTGGAG |
| | | T |
| 382 | Encoding Probe 372 | TGTGATGGAAGTTAGAGGGTTTAGGTAACCCGAT |
| | | AAGGGCCGGAAGAGTGAGTAGTAGTGGAGT |
| 383 | Encoding Probe 373 | TGTGATGGAAGTTAGAGGGTCTCAGCTCCTTATC |
| | | TGTTCGCTGCTAGAGTGAGTAGTAGTGGAGT |
| 384 | Encoding Probe 374 | TGTGATGGAAGTTAGAGGGTCACCTCCTTGCCAT |
| | | TGTCACCAATAAGAGTGAGTAGTAGTGGAGT |
| 385 | Encoding Probe 375 | TGTGATGGAAGTTAGAGGGTGCTCGAGGAAACA |
| | | ATTTCCTCAGGAGAGTGAGTAGTAGTGGAGT |
| 386 | Encoding Probe 376 | TGTGATGGAAGTTAGAGGGTAATTACACGTTTGT |
| | | TCTTCCCATTAGAGTGAGTAGTAGTGGAGT |
| 387 | Encoding Probe 377 | TGTGATGGAAGTTAGAGGGTGTGAAGAGTGAAC |
| | | AAACTTTCGTGAAGAGTGAGTAGTAGTGGAGT |
| 388 | Encoding Probe 378 | TGTGATGGAAGTTAGAGGGTTACTCGTCTAGTCT |
| | | GTTCTTTTGTAAGAGAGAGTGAGTAGTAGTGGAG |
| | | T |
| 389 | Encoding Probe 379 | TGTGATGGAAGTTAGAGGGTAGGCGCTAACGTCA |
| | | AAGGAGCTTCAGAGTGAGTAGTAGTGGAGT |
| 390 | Encoding Probe 380 | TGTGATGGAAGTTAGAGGGTGATAGTGATAGCA |
| | | AAACCATCTTTCTGAAGAGTGAGTAGTAGTGGAG |
| | | T |
| 391 | Encoding Probe 381 | TGTGATGGAAGTTAGAGGGTTCGGCTCCTTATCT |
| | | GTTCGCTCCTGAGAGTGAGTAGTAGTGGAGT |
| 392 | Encoding Probe 382 | TGTGATGGAAGTTAGAGGGTCTCAGCTCCTTATC |
| | | TGTTCGCAGCAGAGTGAGTAGTAGTGGAGT |
| 393 | Encoding Probe 383 | TGTGATGGAAGTTAGAGGGTCACCTCCTTGCCAT |
| | | TGTCACCTTAAGAGTGAGTAGTAGTGGAGT |
| 394 | Encoding Probe 384 | TGTGATGGAAGTTAGAGGGTGGACACTCAATCTC |
| | | ACTGCTTCCTAGAGTGAGTAGTAGTGGAGT |
| 395 | Encoding Probe 385 | TGTGATGGAAGTTAGAGGGTGCCACCACAATTCT |
| | | AGCTAGAGCGAAGAGTGAGTAGTAGTGGAGT |
| 396 | Encoding Probe 386 | TGTGATGGAAGTTAGAGGGTCGGACACTCAATCT |
| | | CACTGCTACCAGAGTGAGTAGTAGTGGAGT |
| 397 | Encoding Probe 387 | TGTGATGGAAGTTAGAGGGTATCCTCACGTATCT |
| | | CAGGCTCCATGAGAGTGAGTAGTAGTGGAGT |
| 398 | Encoding Probe 388 | TGTGATGGAAGTTAGAGGGTAAGCAGCTGCACAT |
| | | ATCGCTAACGAGAGTGAGTAGTAGTGGAGT |

### Example 2.3

[0587] FIG. 5 shows the ability of the HiPR-FISH to differentiate drug-resistant from drug-susceptible microbes in a sample. The following methodology was employed. Carbapenem-resistant or -susceptible Pseudomonas aeruginosa were cultured in liquid tryptic soy broth for several passages. An 8-well device was constructed where each well was filled with 25 μL of tryptic soy agar at 42° C. with various concentrations of meropenem and allowed to dry to create a growth pad for bacteria. For both resistant and susceptible cultures, 1 μL of culture suspension was deposited at the center of each pad and the liquid was allowed to dry/absorb. A #1 coverslip was used to seal the bottom of the device. The device was placed on a custom built stage that enabled temperature regulation on a Nikon TiE widefield epifluorescence microscope. The custom stage contained a chamber that used two Peltier units to keep the bottom of the stage at 37° C. for incubation and the top at 42° C. to prevent condensation. A 40×phase contrast objective was used to continuously image a single field of view in each well of the device every 30 seconds for two hours. At the conclusion of the experiment, 2% formaldehyde was added to each well to fix colonies for down stream assays.

### Example 3. Identification of Fungi

[0588] FIG. 6 shows the identification of different fungi species including C. tropicalis, C. glabrata, and C. albicans, using the following methodology.

[0589] Suspensions of individual monocultures were fixed by adding an equal volume of 2% formaldehyde, mixing, and incubating for 90 minutes at room temperature. Fixed cultures were then washed with 1×PBS and resuspended in 50% ethanol. Suspensions were deposited onto glass microscope slides until 50% ethanol had evaporated. Zymolysae (5 U per mL in a buffer with 1.2 M sorbitol and 0.1 M potassium phosphate buffer, pH 7.5) was deposited onto each dry specimen to permeabilize the outer membrane and incubated for 90 minutes at 30° C., the slides were then washed with 1×PBS. An encoding probe hybridization buffer (2×SSC, 10% dextran sulfate, 10% ethylene carbonate, 5×Denhardt's solution, 0.01% SDS) with probes designed for the fungal species (at roughly 200 nM) was deposited on cells and incubated for two hours at 37° C. A wash buffer (5 mM EDTA, 20 mM Tris HCl, 215 mM NaCl) was then deposited on specimens for fifteen minutes at 37° C. to remove unbound probes. A buffer containing readout probes (10 readout probes, each at 400 nM; buffer made up of 2×SSC, 10% dextran sulfate, 10% ethylene carbonate, 5×Denhardt's solution, 0.01% SDS) was incubated for one hour at room temperature. A second round of wash buffer was deposited on specimens for fifteen minutes at 37° C. to remove unbound probes. The specimens were mounted with Prolong Glass and a coverslip was placed directly over the specimens for imaging on a confocal microscope.

[0590] Table 3 shows the sequences of the encoding probes used in this example. The readout probes are shown in Table 1.

TABLE 3
Encoding probes used in Example 3

| SEQ ID | | |
|---|---|---|
| NO: | Probe Name | Sequence |
| 399 | Encoding Probe 389 | AGGGTGTGTTTGTAAAGGGTACTTCCCCGTGGTTG |
| | | AGTCAAAAAT |
| 400 | Encoding Probe 390 | TGTGGAGGGATTGAAGGATAACTTCCCCGTGGTT |
| | | GAGTCAAAAAT |
| 401 | Encoding Probe 391 | AGGGTGTGTTTGTAAAGGGTACCCCAGACTTGGC |
| | | CTTCCAATTGTAGG |
| 402 | Encoding Probe 392 | TGTGGAGGGATTGAAGGATAACCCCAGACTTGGC |
| | | CTTCCAATTGTAGG |
| 403 | Encoding Probe 393 | AGGGTGTGTTTGTAAAGGGTGAGTTCCAGAATGA |
| | | GGTTGCCAGG |
| 404 | Encoding Probe 394 | TGTGGAGGGATTGAAGGATAGAGTTCCAGAATGA |
| | | GGTTGCCAGG |
| 405 | Encoding Probe 395 | AGGGTGTGTTTGTAAAGGGTAGAGTTCCAGAATG |
| | | AGGTTGCCAGG |
| 406 | Encoding Probe 396 | TGTGGAGGGATTGAAGGATAAGAGTTCCAGAATG |
| | | AGGTTGCCAGG |
| 407 | Encoding Probe 397 | AGGGTGTGTTTGTAAAGGGTAGGGTTCGCCATAA |
| | | ATGGCTACCGTC |
| 408 | Encoding Probe 398 | TGTGGAGGGATTGAAGGATAAGGGTTCGCCATAA |
| | | ATGGCTACCGTC |
| 409 | Encoding Probe 399 | AGGGTGTGTTTGTAAAGGGTTGACATCGACTTGG |
| | | AGTCGATTCA |
| 410 | Encoding Probe 400 | TGTGGAGGGATTGAAGGATATGACATCGACTTGG |
| | | AGTCGATTCA |
| 411 | Encoding Probe 401 | AGGGTGTGTTTGTAAAGGGTCGTTGACTACTGGC |
| | | AGGATCAACCACTA |
| 412 | Encoding Probe 402 | TGTGGAGGGATTGAAGGATACGTTGACTACTGGC |
| | | AGGATCAACCACTA |
| 413 | Encoding Probe 403 | AGGGTGTGTTTGTAAAGGGTACTTCCCCGTGGTTG |
| | | AGTCAATAA |
| 414 | Encoding Probe 404 | TGTGGAGGGATTGAAGGATAACTTCCCCGTGGTT |
| | | GAGTCAATAA |
| 415 | Encoding Probe 405 | AGGGTGTGTTTGTAAAGGGTGGATTCGCCATAAA |
| | | TGGCTACCGTC |
| 416 | Encoding Probe 406 | TGTGGAGGGATTGAAGGATAGGATTCGCCATAAA |
| | | TGGCTACCGTC |
| 417 | Encoding Probe 407 | AGGGTGTGTTTGTAAAGGGTGTAACTTGGAGTCG |
| | | ATAGTCCCAGA |
| 418 | Encoding Probe 408 | TGTGGAGGGATTGAAGGATAGTAACTTGGAGTCG |
| | | ATAGTCCCAGA |
| 419 | Encoding Probe 409 | AGGGTGTGTTTGTAAAGGGTTCGATGACTACTGG |
| | | CAGGATCAACCACTA |
| 420 | Encoding Probe 410 | TGTGGAGGGATTGAAGGATATCGATGACTACTGG |
| | | CAGGATCAACCACTA |
| 421 | Encoding Probe 411 | AGGGTGTGTTTGTAAAGGGTAGTACCTCCCCTGA |
| | | ATCGGGATTCCC |
| 422 | Encoding Probe 412 | TGTGGAGGGATTGAAGGATAAGTACCTCCCCTGA |
| | | ATCGGGATTCCC |
| 423 | Encoding Probe 413 | AGAGTGAGTAGTAGTGGAGTAACTTGCTTTTCTTC |
| | | CTCTAATGACCTTC |
| 424 | Encoding Probe 414 | TTGGAGGTGTAGGGAGTAAAAACTTGCTTTTCTTC |
| | | CTCTAATGACCTTC |
| 425 | Encoding Probe 415 | AGAGTGAGTAGTAGTGGAGTACGTGCTTTTCTTCC |
| | | TCTAATGACCATCA |
| 426 | Encoding Probe 416 | TTGGAGGTGTAGGGAGTAAAACGTGCTTTTCTTCC |
| | | TCTAATGACCATCA |
| 427 | Encoding Probe 417 | AGAGTGAGTAGTAGTGGAGTCGAGCTTTTCTTCCT |
| | | CTAATGACCAACAA |
| 428 | Encoding Probe 418 | TTGGAGGTGTAGGGAGTAAACGAGCTTTTCTTCCT |
| | | CTAATGACCAACAA |
| 429 | Encoding Probe 419 | AGAGTGAGTAGTAGTGGAGTTGTCATGGCTAATC |
| | | TAGCGGGTTA |
| 430 | Encoding Probe 420 | TTGGAGGTGTAGGGAGTAAATGTCATGGCTAATC |
| | | TAGCGGGTTA |
| 431 | Encoding Probe 421 | AGAGTGAGTAGTAGTGGAGTCTGGCATGGCTAAT |
| | | CTAGCGGCTA |
| 432 | Encoding Probe 422 | TTGGAGGTGTAGGGAGTAAACTGGCATGGCTAAT |
| | | CTAGCGGCTA |
| 433 | Encoding Probe 423 | AGAGTGAGTAGTAGTGGAGTGGATTCGCCAAAAG |
| | | GCTAGCCAGTTC |
| 434 | Encoding Probe 424 | TTGGAGGTGTAGGGAGTAAAGGATTCGCCAAAAG |
| | | GCTAGCCAGTTC |
| 435 | Encoding Probe 425 | AGAGTGAGTAGTAGTGGAGTCTGGCATGGCTAAT |
| | | CTAGCGGGAATA |
| 436 | Encoding Probe 426 | TTGGAGGTGTAGGGAGTAAACTGGCATGGCTAAT |
| | | CTAGCGGGAATA |
| 437 | Encoding Probe 427 | AGAGTGAGTAGTAGTGGAGTACCCGCCAAAAGGC |
| | | TAGCCAGAACCT |
| 438 | Encoding Probe 428 | TTGGAGGTGTAGGGAGTAAAACCCGCCAAAAGGC |
| | | TAGCCAGAACCT |
| 439 | Encoding Probe 429 | AGAGTGAGTAGTAGTGGAGTTCTTGCATGGCTAA |
| | | TCTAGCGGGAGTT |
| 440 | Encoding Probe 430 | TTGGAGGTGTAGGGAGTAAATCTTGCATGGCTAA |
| | | TCTAGCGGGAGTT |
| 441 | Encoding Probe 431 | AGAGTGAGTAGTAGTGGAGTCTGGCATGGCTAAT |
| | | CTAGCGGGTTA |
| 442 | Encoding Probe 432 | TTGGAGGTGTAGGGAGTAAACTGGCATGGCTAAT |
| | | CTAGCGGGTTA |
| 443 | Encoding Probe 433 | AGAGTGAGTAGTAGTGGAGTTGTCATGGCTAATC |
| | | TAGCGGGAATA |
| 444 | Encoding Probe 434 | TTGGAGGTGTAGGGAGTAAATGTCATGGCTAATC |
| | | TAGCGGGAATA |
| 445 | Encoding Probe 435 | AGAGTGAGTAGTAGTGGAGTAGGGTTCGCCAAAA |
| | | GGCTAGCGTC |
| 446 | Encoding Probe 436 | TTGGAGGTGTAGGGAGTAAAAGGGTTCGCCAAAA |
| | | GGCTAGCGTC |
| 447 | Encoding Probe 437 | TGTGGAGGGATTGAAGGATATATTCTCTTCCAAG |
| | | AGGTCGAGATTTATT |
| 448 | Encoding Probe 438 | TTGGAGGTGTAGGGAGTAAATATTCTCTTCCAAG |
| | | AGGTCGAGATTTATT |
| 449 | Encoding Probe 439 | TGTGGAGGGATTGAAGGATAGAGATTACCGCGGG |
| | | CTGCTGGGTG |
| 450 | Encoding Probe 440 | TTGGAGGTGTAGGGAGTAAAGAGATTACCGCGGG |
| | | CTGCTGGGTG |
| 451 | Encoding Probe 441 | TGTGGAGGGATTGAAGGATAGTCTCTCCGCTCTG |
| | | AAGTGGAGTCCGG |
| 452 | Encoding Probe 442 | TTGGAGGTGTAGGGAGTAAAGTCTCTCCGCTCTG |
| | | AAGTGGAGTCCGG |
| 453 | Encoding Probe 443 | TGTGGAGGGATTGAAGGATAAAAGTACACGAAAA |
| | | AATCGGACCGGAGT |
| 454 | Encoding Probe 444 | TTGGAGGTGTAGGGAGTAAAAAAGTACACGAAAA |
| | | AATCGGACCGGAGT |
| 455 | Encoding Probe 445 | TGTGGAGGGATTGAAGGATAGTACAGTACACGAA |
| | | AAAATCGGACCGCGG |
| 456 | Encoding Probe 446 | TTGGAGGTGTAGGGAGTAAAGTACAGTACACGAA |
| | | AAAATCGGACCGCGG |
| 457 | Encoding Probe 447 | TGTGGAGGGATTGAAGGATAGTGCCTCCCTGTGT |
| | | CAGGATTCCC |
| 458 | Encoding Probe 448 | TTGGAGGTGTAGGGAGTAAAGTGCCTCCCTGTGT |
| | | CAGGATTCCC |
| 459 | Encoding Probe 449 | TGTGGAGGGATTGAAGGATAGTGCCTCCCTGTGT |
| | | CAGGATTGCCA |
| 460 | Encoding Probe 450 | TTGGAGGTGTAGGGAGTAAAGTGCCTCCCTGTGT |
| | | CAGGATTGCCA |
| 461 | Encoding Probe 451 | TGTGGAGGGATTGAAGGATACATGTGCCGAGTGG |
| | | GTCACTAATTT |
| 462 | Encoding Probe 452 | TTGGAGGTGTAGGGAGTAAACATGTGCCGAGTGG |
| | | GTCACTAATTT |
| 463 | Encoding Probe 453 | TGTGGAGGGATTGAAGGATACTCGGTCACTAAAA |
| | | AAACACCACCCGTAG |
| 464 | Encoding Probe 454 | TTGGAGGTGTAGGGAGTAAACTCGGTCACTAAAA |
| | | AAACACCACCCGTAG |
| 465 | Encoding Probe 455 | TGTGGAGGGATTGAAGGATAAGAGCCAAGGTTAG |
| | | ACTCGCTGCGA |
| 466 | Encoding Probe 456 | TTGGAGGTGTAGGGAGTAAAAGAGCCAAGGTTAG |
| | | ACTCGCTGCGA |
| 467 | Encoding Probe 457 | TGTGGAGGGATTGAAGGATACTGGCATGGCTTAA |
| | | TTTTTAGACAAAATG |
| 468 | Encoding Probe 458 | TTGGAGGTGTAGGGAGTAAACTGGCATGGCTTAA |
| | | TTTTTAGACAAAATG |
| 469 | Encoding Probe 459 | TGTGGAGGGATTGAAGGATATTAATCTCTTCCAA |
| | | GAGGTCGAGATTAAT |
| 470 | Encoding Probe 460 | TTGGAGGTGTAGGGAGTAAATTAATCTCTTCCAA |
| | | GAGGTCGAGATTAAT |

### Example 4. HiPR-FAST One Pot

[0591] Escherichia coli (E. coli) cells were cultured at 30° C. for several passages prior to the start of the experiment. At experiment passage, cultured E. coli were grown in suspension at 30° C. ambient temperature for ninety minutes. Then, their vessel was sealed and placed in a water bath at 46° C. for five minutes. Immediately following the heat shock, the vessel was placed on ice for one minute before a volume of 2% formaldehyde (equal to the volume of the suspension) was added to the suspension and mixed for suspension. Fixing cells were incubated at room temperature for one hour. After one hour, fixed cells were washed with 1×PBS and resuspended in 50% ethanol. A small volume (0.75 μL) was deposited on a glass slide and allowed to dry. The deposition was then rehydrated with 10 mg/ml lysozyme and placed at 37° C. for 15 minutes to encourage permeabilization. Cells were then washed with 1×PBS for ten minutes at room temperature. A hybridization buffer (2×SSC, 10% dextran sulfate, 10% ethylene carbonate, 5×Denhardt's solution, 0.01% SDS) containing rRNA (1 μM per species) and mRNA (1 μM per gene) was added to cells and the slide was placed at 37° C. for one hour. Immediately following hybridization, cells were incubated in wash buffer (5 mM EDTA, 20 mM Tris HCl, 215 mM NaCl) for 15 minutes at 48° C. Finally, the wash buffer was removed and the cells were mounted with Prolong Glass under a #1 coverslip for imaging.

[0592] FIGS. 7A-7C shows gene expression measurement enable rapid detection of stress response in HiPR-FISH. Table 4 shows the sequences of the encoding probes used in this example. The readout probes are shown in Table 1.

TABLE 4
Encoding Probes used in Example 4

| SEQ | | | |
|---|---|---|---|
| ID | Tar- | Probe | |
| NO: | get | Name | Sequence (in 5′ to 3′ order) |
| 471 | rRNA | Encoding | AGGGTGTGTTTGTAAAGGGTCCTCAGTTAAT |
| | | Probe 461 | GATAGTGTGTCGATTG |
| 472 | rRNA | Encoding | ATAGGAAATGGTGGTAGTGTGGAGCCTTGG |
| | | Probe 462 | TTTTCCGGATTACG |
| 473 | rRNA | Encoding | AGGGTGTGTTTGTAAAGGGTGTGTCTCATCT |
| | | Probe 463 | CTGAAAACTTCCCAC |
| 474 | rRNA | Encoding | ATAGGAAATGGTGGTAGTGTGTCACCCCATT |
| | | Probe 464 | AAGAGGCTCCGTG |
| 475 | rRNA | Encoding | AGGGTGTGTTTGTAAAGGGTCCACGTCAATG |
| | | Probe 465 | AGCAAAGGTAAAT |
| 476 | rRNA | Encoding | ATAGGAAATGGTGGTAGTGTGTAAGCTCAC |
| | | Probe 466 | AATATGTGCATAAA |
| 477 | rRNA | Encoding | AGGGTGTGTTTGTAAAGGGTGATACACACA |
| | | Probe 467 | CTGATTCAGGCAGA |
| 478 | rRNA | Encoding | ATAGGAAATGGTGGTAGTGTAGTCTTGGTTT |
| | | Probe 468 | TCCGGATTTGGGA |
| 479 | rRNA | Encoding | AGGGTGTGTTTGTAAAGGGTACCTCAGTTAA |
| | | Probe 469 | TGATAGTGTGTCGTTT |
| 480 | rRNA | Encoding | ATAGGAAATGGTGGTAGTGTGAGCCTTGGTT |
| | | Probe 470 | TTCCGGATTTCGG |
| 481 | rRNA | Encoding | AGGGTGTGTTTGTAAAGGGTGTATCATCTCT |
| | | Probe 471 | GAAAACTTCCGACC |
| 482 | rRNA | Encoding | ATAGGAAATGGTGGTAGTGTGTGCTCAGCCT |
| | | Probe 472 | TGGTTTTCCGCTA |
| 483 | rRNA | Encoding | AGGGTGTGTTTGTAAAGGGTTGCGTCACCCC |
| | | Probe 473 | ATTAAGAGGCAGG |
| 484 | rRNA | Encoding | ATAGGAAATGGTGGTAGTGTCATGTCAATG |
| | | Probe 474 | AGCAAAGGTATTAAGAA |
| 485 | rRNA | Encoding | AGGGTGTGTTTGTAAAGGGTGTAAGCTCAC |
| | | Probe 475 | AATATGTGCATTAAA |
| 486 | rRNA | Encoding | ATAGGAAATGGTGGTAGTGTGAAACTAACA |
| | | Probe 476 | CACACACTGATTGTC |
| 487 | rRNA | Encoding | AGGGTGTGTTTGTAAAGGGTCTAAGTTAATG |
| | | Probe 477 | ATAGTGTGTCGATTG |
| 488 | rRNA | Encoding | ATAGGAAATGGTGGTAGTGTGTGTCTCATCT |
| | | Probe 478 | CTGAAAACTTCCGACC |
| 489 | rRNA | Encoding | AGGGTGTGTTTGTAAAGGGTAGGAAGGCAC |
| | | Probe 479 | ATTCTCATCTCACT |
| 490 | rRNA | Encoding | ATAGGAAATGGTGGTAGTGTCGTCACCCCAT |
| | | Probe 480 | TAAGAGGCTCGGT |
| 491 | rRNA | Encoding | AGGGTGTGTTTGTAAAGGGTGCGTCACCCCA |
| | | Probe 481 | TTAAGAGGCTAGG |
| 492 | rRNA | Encoding | ATAGGAAATGGTGGTAGTGTCATGTCAATG |
| | | Probe 482 | AGCAAAGGTATTATGA |
| 493 | rRNA | Encoding | AGGGTGTGTTTGTAAAGGGTTAGGCTCACA |
| | | Probe 483 | ATATGTGCATTAAA |
| 494 | rRNA | Encoding | ATAGGAAATGGTGGTAGTGTTGACACACAC |
| | | Probe 484 | ACTGATTCAGGGAG |
| 495 | rRNA | Encoding | AGGGTGTGTTTGTAAAGGGTCCTCAGTTAAT |
| | | Probe 485 | GATAGTGTGTCGTTT |
| 496 | mRNA | Encoding | CGTCGGAGTGGGTTCAGTCTATCATCGCCAG |
| | | Probe 486 | CGCCTTACAAAGCTCT |
| 497 | mRNA | Encoding | GATGATGTAGTAGTAAGGGTCGGTTCGAGC |
| | | Probe 487 | TGCGTTGCGGCTTCCA |
| 498 | mRNA | Encoding | GATGATGTAGTAGTAAGGGTAAGACCACGC |
| | | Probe 488 | GCCAGTGCAGGTTTCA |
| 499 | mRNA | Encoding | GATGATGTAGTAGTAAGGGTGCACGCTGCT |
| | | Probe 489 | GCAACAATTGCCGGGT |
| 500 | mRNA | Encoding | GATGATGTAGTAGTAAGGGTGTCTACGCGG |
| | | Probe 490 | CGGCCTTTCAACCCTT |
| 501 | mRNA | Encoding | GATGATGTAGTAGTAAGGGTTTAACGCTGC |
| | | Probe 491 | GCCAGACCTTCAACGA |
| 502 | mRNA | Encoding | GATGATGTAGTAGTAAGGGTCAGAAGCGTC |
| | | Probe 492 | GTGGCACCTACGCAGT |
| 503 | mRNA | Encoding | GATGATGTAGTAGTAAGGGTCAGACCCACA |
| | | Probe 493 | CGGCGAGCCTGTTCAA |
| 504 | mRNA | Encoding | GATGATGTAGTAGTAAGGGTCGCACGACGC |
| | | Probe 494 | ACCGCTTCGGTCAGAT |
| 505 | mRNA | Encoding | GATGATGTAGTAGTAAGGGTAAAATCCGGC |
| | | Probe 495 | AGCTGACGGTCAGCAA |
| 506 | mRNA | Encoding | GATGATGTAGTAGTAAGGGTAAATCGCGCT |
| | | Probe 496 | CGCTTTCCATCATGCG |
| 507 | mRNA | Encoding | GATGATGTAGTAGTAAGGGTGAATACCCGC |
| | | Probe 497 | GCCGACCATGGTATGT |
| 508 | mRNA | Encoding | GATGATGTAGTAGTAAGGGTCTATGGGCAT |
| | | Probe 498 | CGGCAAGAGCAAGCTG |
| 509 | mRNA | Encoding | GATGATGTAGTAGTAAGGGTACGTTTCAGG |
| | | Probe 499 | ATGTCGGCCAGCGTGC |
| 510 | mRNA | Encoding | GATGATGTAGTAGTAAGGGTAGCATACGGA |
| | | Probe 500 | CCATCGCCTCGTCGCT |
| 511 | mRNA | Encoding | GATGATGTAGTAGTAAGGGTGCATGCAGCA |
| | | Probe 501 | CCTGAATGGTACGGCG |
| 512 | mRNA | Encoding | GATGATGTAGTAGTAAGGGTTTATTGCACAT |
| | | Probe 502 | GGTGGTGCAGCTCGT |
| 513 | mRNA | Encoding | GATGATGTAGTAGTAAGGGTCTTTTGGTTGT |
| | | Probe 503 | CGTGCCCGAGTGCAA |
| 514 | mRNA | Encoding | GATGATGTAGTAGTAAGGGTAACAGTAATG |
| | | Probe 504 | TTGGCGGTGGTCGCCC |
| 515 | mRNA | Encoding | GATGATGTAGTAGTAAGGGTGGTATCGGGC |
| | | Probe 505 | GATTTGGATCCGCCAG |
| 516 | mRNA | Encoding | GATGATGTAGTAGTAAGGGTTCATTGCCTTG |
| | | Probe 506 | TTCGGCTCGTTCGGT |
| 517 | mRNA | Encoding | GATGATGTAGTAGTAAGGGTTTGGCGCACC |
| | | Probe 507 | AGATCCTGTGATGGCT |
| 518 | mRNA | Encoding | GATGATGTAGTAGTAAGGGTTACGCTTACCA |
| | | Probe 508 | CACCGAGCACCAGCT |
| 519 | mRNA | Encoding | GATGATGTAGTAGTAAGGGTCTACGTTCACG |
| | | Probe 509 | CTTTCACCTCCACGC |
| 520 | mRNA | Encoding | GATGATGTAGTAGTAAGGGTGTGCCGTTGG |
| | | Probe 510 | GCCGAGGAACAGGAAT |
| 521 | mRNA | Encoding | GATGATGTAGTAGTAAGGGTCCGGCACCAA |
| | | Probe 511 | CCAGACGAGACACCGA |
| 522 | mRNA | Encoding | GATGATGTAGTAGTAAGGGTGACGACGGCG |
| | | Probe 512 | ACGATCCGGTCTTCAT |
| 523 | mRNA | Encoding | GATGATGTAGTAGTAAGGGTATTCGCGATG |
| | | Probe 513 | GTGCAGTTCTTGCTCC |
| 524 | mRNA | Encoding | GATGATGTAGTAGTAAGGGTGACGAAACGA |
| | | Probe 514 | CGTTCCAGCGCAGCAT |

### Example 5. HiPR Swap

[0593] DNA exchange was used as a method to quickly, specifically, carefully replace the HiPR-FISH readout probes without disturbing encoding and/or amplifier probes. This method is referred to as HiPR-Swap.

[0594] In the HiPR-Swap method, readout and encoding probes are designed such that the “landing pad” (the region on the encoding probe to which the readout probe binds) is complementary to the readout probe. In some instances, the landing pad sequence is shorter than the readout probe. This would create a single-stranded overhang of the readout probe, as it extends past the end of the landing pad (see FIG. 8, line (2)).

[0595] After a readout probe is bound, an exchange probe can be added to the specimen. The exchange probe is constructed to be of equal length and a perfect reverse complement to the readout probe. When added, the exchange probe seeds a hybridization to the exposed area of the readout probe (see FIG. 8, line 3a). Over a short period of time the exchange probe completely hybridizes to the readout probe, thereby removing it from the encoding probe where it can be washed away. Importantly, orthogonal (non-interacting at room temperature to 42° C.) readout and exchange probes can be added simultaneously to reduce assay time (see FIG. 8, lines 3b and 3c.)

[0596] In theory, there is no limit to the number of times the assay can be performed. The maximum number of probes needed is the number of fluorescent probes observable in a single round (for example, 10) multiplied by the number of rounds. For example, if 4 rounds are performed, this will require 40 unique probes each bound with one of 10 fluorescent dyes. This would allow the target multiplexity to be (2\hat{ }(10)−1)\hat{ }4=1,095,222,947,841 targets.

[0597] Advantages

[0598] Thermodynamics models can be applied to understand the extent to which probe swapping is likely to succeed. For example, the Boltzmann factor can be naively implemented to illustrate the improved likelihood of the readout-exchange probe duplex over the readout-encoding probe duplex (false assumption that the system is at equilibrium).

[0599] The probability of being in a state is given by the distribution:

$$P ( {ε}_{n} ) = \frac{1}{Z} {e}^{- {ε}_{n} / {k}_{B} T} .$$

[0600] Knowing this, one can find the Boltzmann factor as the ratio of probabilities (P(readout-exchange)/P(readout-encoding)).

[0601] The Boltzmann factor for various combinations of the readout probes was determined, where the overhang can be 1 to 5 nt from the 3′ or 5′ end (yellow or blue, respectively) and found that the likelihood of being in the readout-exchange state increases dramatically as the length of the overhang increases; the Boltzmann factor can exceed 10,000×.

[0602] HiPR-Swap, in combination with other technologies, will create a FISH-based assay with the highest multiplexity yet achieved. Its application to spectral barcoding and classification, to the study of microbiomes and bacteria, and its use to profile rRNA and mRNA (and potentially other analytes) make this method an improvement over the prior art.

### Example 6. HiPR-Swap

[0603] An experiment was performed where three species of bacteria (Escherichia coli, Pseudomonas aeruginosa, and Klebsiella pneumoniae) were encoded with 18-24 encoding probes, with 15-nt landing pads. Each species was encoded such that they were hybridized with a single, unique bit (or dye).

[0604] The experiment was performed to (1) show the addition of exchange probes removes readout probes (and thereby fluorescence signal) and (2) following the exchange, new readout probes can be re-hybridized to the specimens without the addition of new encoding probes.

[0605] The procedure was as follows: Cells were adhered to a coverslip via evaporation. Each species of bacteria was separated from the others using a gasket. The cells were then digested with lysozyme at 37° C. for 30 minutes and washed with 1×PBS at room temperature for 15 minutes. The encoding probe hybridization and readout probe hybridization were performed in a single step. The hybridization buffer was prepared separately for each species (10% ethylene carbonate, 10% dextran sulfate, 2×SSC, 5×Denhardt's solution, 0.01% SDS, 400 nM of the readout probe, 2 uM per taxa of the encoding probes). The hybridization buffer was then added to the cells at 37° C. for 2 hours. The wash buffer (215 mM NaCl, 20 mM Tris-HCl (pH 8.0), and 5 mM EDTA) was then added to the cells at 30° C. for 15 minutes. The cells were imaged in the wash buffer. The cells were removed from the scope. The exchange buffer was then added to the cells at 37° C. and left overnight. The exchange buffer was prepared separately for each species (10% ethylene carbonate, 10% dextran sulfate, 2×SSC, 5×Denhardt's solution, 0.01% SDS, and 2 uM of the exchange probe). The wash buffer was added to the cells at 30° C. for 15 minutes. The cells were imaged in the wash buffer. The readout buffer (prepared separately for each species: 10% ethylene carbonate, 10% dextran sulfate, 2×SSC, 5×Denhardt's solution, 0.01% SDS, and 400 nM of the readout probe) was added to the cells and incubated at 37° C. for 2 hours. The wash buffer was added to the cells at 30° C. for 15 minutes. The cells were imaged in the wash buffer. The cells were removed from the scope and stored at 4° C.

[0606] As evidenced by FIG. 9, the results of the experiment showed that each species was properly encoded after the first round (“HiPR-FISH”). Further, each species had their fluorescence signal, and thus readout probes, removed with exchange probes (“Strip”), and the original signal was fully recovered (with correct encoding), with addition of readout probes after the Strip (“Swap”).

[0607] The encoding, readout, and exchange probes used in this example are shown in Table 5 below.

TABLE 5
Encoding, readout, and exchange probes used in Example 6.

| SEQ ID NO: | Probe Name | Sequence |
|---|---|---|
| 525 | Encoding Probe 515 | TGGAAGTTAGAGGGTCCTCAGTTAATGATAGT |
| | | GTGTCGATTG |
| 526 | Encoding Probe 516 | TGGAAGTTAGAGGGTGGAGCCTTGGTTTTCCG |
| | | GATTACG |
| 527 | Encoding Probe 517 | TGGAAGTTAGAGGGTGTGTCTCATCTCTGAAA |
| | | ACTTCCCAC |
| 528 | Encoding Probe 518 | TGGAAGTTAGAGGGTGTCACCCCATTAAGAG |
| | | GCTCCGTG |
| 529 | Encoding Probe 519 | TGGAAGTTAGAGGGTCCACGTCAATGAGCAA |
| | | AGGTAAAT |
| 530 | Encoding Probe 520 | TGGAAGTTAGAGGGTGTAAGCTCACAATATGT |
| | | GCATAAA |
| 531 | Encoding Probe 521 | TGGAAGTTAGAGGGTGATACACACACTGATTC |
| | | AGGCAGA |
| 532 | Encoding Probe 522 | TGGAAGTTAGAGGGTAGTCTTGGTTTTCCGGA |
| | | TTTGGGA |
| 533 | Encoding Probe 523 | TGGAAGTTAGAGGGTACCTCAGTTAATGATAG |
| | | TGTGTCGTTT |
| 534 | Encoding Probe 524 | TGGAAGTTAGAGGGTGAGCCTTGGTTTTCCGG |
| | | ATTTCGG |
| 535 | Encoding Probe 525 | TGGAAGTTAGAGGGTGTATCATCTCTGAAAAC |
| | | TTCCGACC |
| 536 | Encoding Probe 526 | TGGAAGTTAGAGGGTGTGCTCAGCCTTGGTTT |
| | | TCCGCTA |
| 537 | Encoding Probe 527 | TGGAAGTTAGAGGGTTGCGTCACCCCATTAAG |
| | | AGGCAGG |
| 538 | Encoding Probe 528 | TGGAAGTTAGAGGGTCATGTCAATGAGCAAA |
| | | GGTATTAAGAA |
| 539 | Encoding Probe 529 | TGGAAGTTAGAGGGTGTAAGCTCACAATATGT |
| | | GCATTAAA |
| 540 | Encoding Probe 530 | TGGAAGTTAGAGGGTGAAACTAACACACACA |
| | | CTGATTGTC |
| 541 | Encoding Probe 531 | TGGAAGTTAGAGGGTCTAAGTTAATGATAGTG |
| | | TGTCGATTG |
| 542 | Encoding Probe 532 | TGGAAGTTAGAGGGTGTGTCTCATCTCTGAAA |
| | | ACTTCCGACC |
| 543 | Encoding Probe 533 | TGGAAGTTAGAGGGTAGGAAGGCACATTCTC |
| | | ATCTCACT |
| 544 | Encoding Probe 534 | TGGAAGTTAGAGGGTCGTCACCCCATTAAGA |
| | | GGCTCGGT |
| 545 | Encoding Probe 535 | TGGAAGTTAGAGGGTGCGTCACCCCATTAAG |
| | | AGGCTAGG |
| 546 | Encoding Probe 536 | TGGAAGTTAGAGGGTCATGTCAATGAGCAAA |
| | | GGTATTATGA |
| 547 | Encoding Probe 537 | TGGAAGTTAGAGGGTTAGGCTCACAATATGTG |
| | | CATTAAA |
| 548 | Encoding Probe 538 | TGGAAGTTAGAGGGTTGACACACACACTGATT |
| | | CAGGGAG |
| 549 | Encoding Probe 539 | AGGTTGAGAATAGGAGAGGCTCAGTAGTTTT |
| | | GGATGCTCA |
| 550 | Encoding Probe 540 | AGGTTGAGAATAGGAAGACGCGTCACTTACG |
| | | TGACACGGC |
| 551 | Encoding Probe 541 | AGGTTGAGAATAGGAGTGGAGGTGCTGGTAA |
| | | CTAAGCTG |
| 552 | Encoding Probe 542 | AGGTTGAGAATAGGACTAGTTTTATGGGATTA |
| | | GCTCCAGGA |
| 553 | Encoding Probe 543 | AGGTTGAGAATAGGAGAGGAAAGTTCTCAGC |
| | | ATGTCTTC |
| 554 | Encoding Probe 544 | AGGTTGAGAATAGGAACACCCATGCTCGGCA |
| | | CTTCTCCC |
| 555 | Encoding Probe 545 | AGGTTGAGAATAGGACGCGGTGTTTTTCACAC |
| | | CCATACA |
| 556 | Encoding Probe 546 | AGGTTGAGAATAGGATGGCCAGAGTGATACA |
| | | TGAGGGCG |
| 557 | Encoding Probe 547 | AGGTTGAGAATAGGATGGCTATCTCCGAGCTT |
| | | GATTTCG |
| 558 | Encoding Probe 548 | AGGTTGAGAATAGGAGGCACACAGGAAATTC |
| | | CACCAAGG |
| 559 | Encoding Probe 549 | AGGTTGAGAATAGGAAAGATCCAACTTGCTG |
| | | AACCAGGA |
| 560 | Encoding Probe 550 | AGGTTGAGAATAGGATGCGTCACCTAACAAG |
| | | TAGGCAGG |
| 561 | Encoding Probe 551 | AGGTTGAGAATAGGACGTGTATTAACTTACTG |
| | | CCCTTCGAG |
| 562 | Encoding Probe 552 | AGGTTGAGAATAGGAACAAGACAAAGTTTCT |
| | | CGTGCAGG |
| 563 | Encoding Probe 553 | AGGTTGAGAATAGGAAAACTTCAAAGATCCT |
| | | TTCGCCAT |
| 564 | Encoding Probe 554 | AGGTTGAGAATAGGAGCACGCTAAAATCAAT |
| | | GAAGCTATT |
| 565 | Encoding Probe 555 | AGGTTGAGAATAGGACGATCTGATAGCGTGA |
| | | GGTCCCTT |
| 566 | Encoding Probe 556 | AGGTTGAGAATAGGAATAATTCAGTACAAGA |
| | | TACCTAGGAAT |
| 567 | Encoding Probe 557 | AGGTTGAGAATAGGAAGGCGCTGAATCCAGG |
| | | AGCAACGA |
| 568 | Encoding Probe 558 | AGGTTGAGAATAGGACAAAACGCTCTATGAT |
| | | CGTCAATA |
| 569 | Encoding Probe 559 | AGGTTGAGAATAGGAGCAGTGTTTTTCACACC |
| | | CATTGTGCA |
| 570 | Encoding Probe 560 | AGGTTGAGAATAGGACTGCGATCGGTTTTATG |
| | | GGATATC |
| 571 | Encoding Probe 561 | AGGTTGAGAATAGGAGGATCGACGTGTCTGT |
| | | CTCGCTCA |
| 572 | Encoding Probe 562 | AGGTTGAGAATAGGAGGTGCAGTAACCAGAA |
| | | GTACACCT |
| 573 | Encoding Probe 563 | GGTGTAGGGAGTAAAACCTCTTCGACTGGTCT |
| | | CAGCAGG |
| 574 | Encoding Probe 564 | GGTGTAGGGAGTAAATGCAATCGATGAGGTT |
| | | ATTAACCTGTA |
| 575 | Encoding Probe 565 | GGTGTAGGGAGTAAACATCAGTCACACCCGA |
| | | AGGTGCTAGG |
| 576 | Encoding Probe 566 | GGTGTAGGGAGTAAAGCAATCGATGAGGTTA |
| | | TTAACCTGTA |
| 577 | Encoding Probe 567 | GGTGTAGGGAGTAAACATCAGTCACACCCGA |
| | | AGGTGCAGG |
| 578 | Encoding Probe 568 | GGTGTAGGGAGTAAAATGAGTCACACCCGAA |
| | | GGTGCTAGG |
| 579 | Encoding Probe 569 | GGTGTAGGGAGTAAATCCCTTCACCTACACAC |
| | | CAGCGACG |
| 580 | Encoding Probe 570 | GGTGTAGGGAGTAAATCCCTTCACCTACACAC |
| | | CAGCCAC |
| 581 | Encoding Probe 571 | GGTGTAGGGAGTAAATGACCGCAACCCCGGT |
| | | GAGGGCGG |
| 582 | Encoding Probe 572 | GGTGTAGGGAGTAAAAGAGACTGGTCTCAGC |
| | | TCCACGGC |
| 583 | Encoding Probe 573 | GGTGTAGGGAGTAAAATGAGTCACACCCGAA |
| | | GGTGCAGG |
| 584 | Encoding Probe 574 | GGTGTAGGGAGTAAATGCGTCACACCCGAAG |
| | | GTGCTAGG |
| 585 | Encoding Probe 575 | GGTGTAGGGAGTAAAGTGCTCAGCCTTGATTA |
| | | TCCGCTA |
| 586 | Encoding Probe 576 | GGTGTAGGGAGTAAACCACGTCAATCGATGA |
| | | GGTTAAAT |
| 587 | Encoding Probe 577 | GGTGTAGGGAGTAAAAATAACCTCATCGCCTT |
| | | CCTCAGG |
| 588 | Encoding Probe 578 | GGTGTAGGGAGTAAACCCACGTCAATCGATG |
| | | AGGTTTAA |
| 589 | Encoding Probe 579 | GGTGTAGGGAGTAAACATCAGTCACACCCGA |
| | | AGGTGGAG |
| 590 | Encoding Probe 580 | GGTGTAGGGAGTAAACCCTTCACCTACACACC |
| | | AGCGACG |
| 4 | Readout Probe 4 | /5PacificGreenN/ACCCTCTAACTTCCATCACA |
| 6 | Readout Probe 6 | /5Atto610N/TTTACTCCCTACACCTCCAA |
| 8 | Readout Probe 8 | /5DyLight-510-LS/ |
| | | TCCTATTCTCAACCTAACCT/3DyLight-510-LS/ |
| 591 | Exchange Probe 1 | TGTGATGGAAGTTAGAGGGT |
| 592 | Exchange Probe 2 | TTGGAGGTGTAGGGAGTAAA |
| 593 | Exchange Probe 3 | AGGTTAGGTTGAGAATAGGA |

### Example 7. Timescale Determination the Exchange Reaction in HiPR-Swap

[0608] The experiment was continued after 5 days in the same samples as described in Example 6. To determine the timescale of the exchange reaction, the reaction was performed for 1 hour.

[0609] The experiment was performed to show that the stripping of readout probes can be achieved within 1 hour, as opposed to a longer period of time, such as over 12 hours.

[0610] The procedure was as follows. The cells were removed from the 4° C. refrigerator after 5 days and imaged in the wash buffer. The cells were removed from the scope and the exchange buffer was added to the cells at 37° C. for 1 hour. The wash buffer was then added to the cells at 30° C. for 15 minutes and the cells were imaged in the wash buffer. The encoding, readout, and exchange probes used in this example are shown in Table 5.

[0611] As can be seen in FIG. 10, the experiment showed that the fluorescence signal from P. aeruginosa and K. pneumoniae did not degrade significantly after 5 days. The fluorescence signal from E. coli had degraded significantly due to rapid photobleaching and instability of the Atto-390 dye in the wash buffer (“After 5 days”). Each species had most of their readout probes removed within a span of 1 hour (“Strip—1 hr”). There is a small fluorescence signal left after 1 hour. Therefore, the whole exchange reaction can be completed within 1.5-2 hours or less.

### Example 8. Recovery Of Signal With Different Readout Probes in HiPR-Swap

[0612] This experiment was performed to show the sequential repeatability of the HiPR-Swap method and continues from Example 7.

[0613] After stripping the readout probes for 1 hour, the stripping reaction was continued overnight to remove the remaining readout probes. Following this, each species was encoded with the readout probes that correspond to their respective readout pads but tagged with the same dye (Alexa-488).

[0614] The procedure was as follows. The exchange buffer was added to the cells at 37° C. and left overnight. The wash buffer was then added to the cells at 30° C. for 15 minutes and the cells were imaged in the wash buffer. The cells were removed from the scope. A readout buffer was prepared separately for each species containing one of the following probes: R4-488, R6-488, R8-488. The readout buffer was then added to the cells and incubated at 37° C. for 2 hours. The wash buffer was added to the cells at 30° C. for 15 minutes and the cells were imaged in the wash buffer.

[0615] As shown in FIG. 11, the experiment showed that the fluorescent signal was completely removed from each species (“Strip-overnight”) and the fluorescence signal was recovered with the encoded color (green, not shown) after adding the readout probes (“Swap—R #-488”).

[0616] Overall, these results demonstrate the full two cycles of HiPR-swap assay with robust removal and re-hybridization of the readout probes.

[0617] The R4-488, R6-488, R8-488 probes are shown in Table 6 below.

TABLE 6
488 Readout Probes.

| SEQ ID | | |
|---|---|---|
| NO: | Probe Name | Sequence (in 5′ to 3′ order) |
| 594 | R4-488 | /5Alex488N/ACCCTCTAACTTCCATCACA |
| 595 | R6-488 | /5Alex488N/TTTACTCCCTACACCTCCAA |
| 596 | R8-488 | /5Alex488N/TCCTATTCTCAACCTAACCT |

### Example 9. Single-Step Probe Exchange and New Readout Addition

[0618] As shown in Examples 6-7, the readout probes can be removed (stripped) and replaced (swapped) in two subsequent steps. As long as the second round of readout probes differs from the first set that is being removed with exchange probes, the strip and swap can be performed in a single step.

[0619] Single-step HiPR-Swap and two-step HiPR-Swap was performed on a single slide with neighboring wells. In both wells, a mixture of E. coli and P. aeruginosa cells was adhered to the surface.

[0620] Round 1: In the first round for both wells, the taxa encoding probes for both species (including EUB which will serve as a tool to segment cells for analysis) were added and readout probes only for E. coli. The encoding and readout hybridization reactions were performed in a single step. Both wells were imaged following the first round of encoding and readout.

[0621] Round 2: In round two of the single-step well, the readout probes from E. coli were stripped and swapped with the readout probes for P. aeruginosa. For the two-step well, only the readout probes were stripped from E. coli. Both wells were imaged following this hybridization step.

[0622] Round 3: In round three of the single-step well, the readout probes from P. aeruginosa were stripped and swapped with the readout probes for E. coli. For the two-step well, only the readout probes were stripped from P. aeruginosa. Both wells were imaged following this hybridization step.

[0623] The experiment was conducted as follows mixtures of cells were adhered to a coverslip via evaporation. The cells were digested with lysozyme at 37° C. for 30 minutes. The cells were washed with 1×PBS at room temperature for 15 minutes.

[0624] Round 1: The encoding probe hybridization and readout probe hybridization were performed in a single step. The hybridization buffer was prepared as follows for both the wells: 10% ethylene carbonate, 10% dextran sulfate, 2×SSC, 5×Denhardt's solution, 0.01% SDS, 2 uM per taxa of the encoding probes, 400 nM of the Eubacterium probe, and 400 nM of the readout probe for E. coli. The hybridization buffer was added to the cells at 37° C. for 2 hours. The wash buffer (215 mM NaCl, 20 mM Tris-HCl (pH 8.0); and 5 mM EDTA) was added to the cells at 30° C. for 15 minutes. All wells were filled in excess with 2×SSC. A glass coverslip was placed on top of the wells to minimize evaporation. The cells were imaged under 2×SSC. Then, the cells were removed from the scope. The cells were washed with wash buffer for 1 min at RT. The cells were stored overnight in the wash buffer at 4° C.

[0625] Round 2: The exchange buffers were prepared separately for each well. Well: Single Step: 10% ethylene carbonate, 10% dextran sulfate, 2×SSC, 5×Denhardt's solution, 0.01% SDS, 6 uM of the exchange probe for E. coli, and 400 nM of the readout probes for P. aeruginosa. Well: Two Step: 10% ethylene carbonate, 10% dextran sulfate, 2×SSC, 5×Denhardt's solution, 0.01% SDS, and 6 uM of the exchange probe for E. coli.

[0626] The exchange buffers were added to the cells at 37° C. for 2 hours. The wash buffer was added to the cells at 30° C. for 15 minutes. All wells were filled in excess with 2×SSC. A glass coverslip was placed on top of the wells to minimize evaporation. The cells were imaged under 2×SSC. The cells were removed from the scope. The cells were washed with wash buffer for 1 min at RT.

[0627] Round 3: The exchange buffers were prepared separately for each well. Well: Single Step: 10% ethylene carbonate, 10% dextran sulfate, 2×SSC, 5×Denhardt's solution, 0.01% SDS, 6 uM of the exchange probe for P. aeruginosa, and 400 nM of the readout probes for E. coli. Well: Two Step: 10% ethylene carbonate, 10% dextran sulfate, 2×SSC, 5×Denhardt's solution, 0.01% SDS, and 400 nM of the readout probes probe for P. aeruginosa. The exchange buffers were added to the cells at 37° C. for 2 hours. The wash buffer was added to the cells at 30° C. for 15 minutes. All wells were filled in excess with 2×SSC. A glass coverslip was placed on top of the wells to minimize evaporation. The cells were imaged under 2×SSC. The encoding, readout, and exchange probes used in this example are shown in Table 5.

[0628] The single-step strip and swap reaction works equally well as the two-step reaction. This enables us to perform multiple rounds of HiPR-Swap (for example, at least 3 rounds for 30 bit barcode) in less than 12 hours.

[0629] As shown in FIG. 12, with single-step condition, successful demonstration of HiPR-Swap was shown up to 3 rounds.

[0630] In single step condition, E. coli in round 1 is dimmer than the E. coli in round 3. This is likely because of the inefficient binding of readout probes to the readout pads in the first round of encoding/readout, where single step encoding and readout was used to perform HiPR-FISH. An addition of pre-hybridization incubation step before encoding/readout step can improve the binding efficiency of readout probes in round 1.

### Example 10. Realtime Measurement of HiPR-Swap Using Single-Step Strip and Swap Reaction

[0631] The single step strip and swap reaction was shown to work equally well as the two-step reaction. In this example, the single-step reaction was used to measure the stripping and swapping of the probes in real time.

[0632] Single-step HiPR-Swap was performed with a mixture of E. coli and P. aeruginosa cells.

[0633] Round 1: In the first round, the taxa encoding probes were added for both species and readout probes only for E. coli. The encoding and readout hybridization reactions were performed in a single step. The cells were imaged after this hybridization step.

[0634] Round 2: In the second round, the cells were placed under the microscope. the readout probes were stripped from E. coli and swapped with the readout probes for P. aeruginosa. Images were acquired while the stripping and swapping reaction was undergoing.

[0635] The following was performed in this example. Mixture of cells were adhered to a coverslip via evaporation. The cells were digested with lysozyme at 37° C. for 30 minutes and washed with 1×PBS at room temperature for 15 minutes. The pre-hybridization buffer (10% ethylene carbonate, 10% dextran sulfate, 2×SSC, 5×Denhardt's solution, 0.01% SDS) was added to the cells at 37° C. for 30 mins.

[0636] Round 1: The encoding probe hybridization and readout probe hybridization were performed in a single step. The hybridization buffer (both wells; 10% ethylene carbonate, 10% dextran sulfate, 2×SSC, 5×Denhardt's solution, 0.01% SDS, 2 μM per taxa of the encoding probes, and 400 nM of the readout probe for E. coli) was added to the cells at 37° C. for 2 hours. The wash buffer (215 mM NaCl, 20 mM Tris-HCl (pH 8.0); and 5 mM EDTA) was added to the cells at 30° C. for 15 minutes. The cells were placed on the microscope and imaged under the wash buffer before acquiring the timelapse.

[0637] Round 2: The wash buffer was removed and the well was filled with the exchange buffer (10% ethylene carbonate, 10% dextran sulfate, 2×SSC, 5×Denhardt's solution, 0.01% SDS, 50 nM of the exchange probe for E. coli, and 25 nM of the readout probes for P. aeruginosa) under the microscope. The timelapse was started and images were acquired at a 15 seconds interval. The encoding, readout, and exchange probes used in this example are shown in Table 5.

[0638] As shown in FIG. 13, the real time stripping and swapping of the readout probes in the mixture of two species was demonstrated.

[0639] To capture the kinetics of this reaction, the reaction was purposefully slowed down dramatically by using a very low concentration of the exchange probes (50 nM) and the readout probes (25 nM). At higher concentrations, such as 2 uM for exchange probes and 400 nM for readout probes, in here the strip and swap reactions can be completed within a few minutes.

[0640] Notably, with the addition of the pre-hybridization step, the binding efficiency of the readout probes in the first round improved dramatically, as evident from the intensity of the “before” image in timelapse.

### Example 11. E. coli Encoding with 30-Bit Barcode, and Measured in 3 Rounds

[0641] To show the full potential of using HiPR-Swap towards increasing the multiplexity of HiPR-FISH related assays, including HIPR-FAST and HIPR-cycle, the ability to identify over 1 billion taxa (or other targets; 1023\hat{ }3) in about 12 hours was shown. FIG. 14 shows a schematic for this example and FIG. 15 shows an overview of HiPR-Swap as in this example.

[0642] This example was performed with E. coli bacteria bound to the coverslips in three wells. The bacteria in each well was encoded with a unique 30-bit barcode (e.g. 0110001000-0100100111-1101001000). The 30-bit experiment was performed in three rounds using HIPR-Swap, with each round containing up to 10-bits. A fourth round was added for error correction by going back to the same readouts as round 1.

[0643] Round 1: In the first round, the taxa encoding probes for bacteria were added in each well and incubated overnight. The first set of readout probes were added in each well. The cells were imaged after this hybridization step.

[0644] Round 2: In the second round, the first set of exchange probes to strip readout probes of round 1 was added, and second set of readout probes in each well. The cells were imaged after this hybridization step.

[0645] Round 3: In the third round, the second set of exchange probes to strip readout probes of round 2 was added, and third set of readout probes in each well. The cells were imaged after this hybridization step.

[0646] Round 4: In the fourth round, the third set of exchange probes to strip readout probes of round 3 were added, and first set of readout probes in each well. This was done to go back to the same sets of readout probes as used in round 1. The cells were imaged after this hybridization step.

[0647] The single step HiPR-Swap protocol was utilized as follows: cells were adhered to a coverslip via evaporation. The cells were digested with lysozyme at 37° C. for 30 minutes. The cells were washed with 1×PBS at room temperature for 15 minutes.

[0648] Round 1: The encoding buffer was prepared separately for each well as follows: 10% ethylene carbonate, 10% dextran sulfate, 2×SSC, 5×Denhardt's solution, 0.01% SDS, 2 μM each of encoding probes combination (C #, where #=readout probe #) as described below—
[0649] Well 1: C11+C13+C16+C18
[0650] Well 2: C12+C15+C21
[0651] Well 3: C13+C17+C19
   A combination of encoding probes, C #, encompasses 24 encoding probes (as shown in Table 7 below) each concatenated to readout landing pads sequences corresponding to a specific readout probe number (#). For example, Combination 11 (C11) corresponds to 24 encoding probes each concatenated to landing pad sequence 11: TTAATATGGGTAGTTGGG (SEQ ID NO.: 1810). The landing pad sequence is partially complementary to the sequence of Readout Probe 11 (SEQ ID NO.: 597).

[0652] The encoding buffer was added to the cells at 37° C. and incubated overnight. The wash buffer was prepared as 215 mM NaCl, 20 mM Tris-HCl (pH 8.0), 5 mM EDTA. The wash buffer was added to the cells at 42° C. for 15 minutes. The readout buffer was prepared as follows 10% ethylene carbonate, 10% dextran sulfate, 2×SSC, 5×Denhardt's solution, 0.01% SDS, and 400 nM each of readout probe 11, 12, 13. The readout buffer was added to the cells at 37° C. for 1 hour. The wash buffer was added to the cells at 42° C. for 15 minutes. All wells were filled in excess with 2×SSCT. A glass coverslip was placed on top of the wells to minimize evaporation. The cells were imaged under 2×SSCT. The cells were removed from the scope. The cells were washed with 2×SSC for 1 min at RT.

[0653] Round 2: The exchange buffer for round 2 was prepared as follows 10% ethylene carbonate, 10% dextran sulfate, 2×SSC, 5×Denhardt's solution, 0.01% SDS, 10 uM each of exchange probe 5, 8, and 10, 400 nM each of readout probe 14-17. The exchange buffer was added to the cells at 37° C. for 1 hour. The wash buffer was added to the cells at 42° C. for 15 minutes. All wells were filled in excess with 2×SSCT. A glass coverslip was placed on top of the wells to minimize evaporation. The cells were imaged under 2×SSCT. The cells were removed from the scope. The cells were washed with 2×SSC for 1 min at RT.

[0654] Round 3: The exchange buffer for round 3 was prepared as follows: 10% ethylene carbonate, 10% dextran sulfate, 2×SSC, 5×Denhardt's solution, 0.01% SDS, 10 uM each of exchange probe 14, 15, 17, 18, 400 nM each of readout probe 18-21. The exchange buffer was added to the cells at 37° C. for 1 hour. The wash buffer was added to the cells at 42° C. for 15 minutes. All wells were filled in excess with 2×SSCT. A glass coverslip was placed on top of the wells to minimize evaporation. The cells were imaged under 2×SSCT. The cells were removed from the scope. The cells were washed with 2×SSC for 1 min at RT.

[0655] Round 4: The exchange buffer for round 4 was prepared as follows: 10% ethylene carbonate, 10% dextran sulfate, 2×SSC, 5×Denhardt's solution, 0.01% SDS, 10 uM each of exchange probe 24, 25, 28, 30, 400 nM each of readout probe 11, 12, and 13. The exchange buffer was added to the cells at 37° C. for 1 hour. The wash buffer was added to the cells at 42° C. for 15 minutes. All wells were filled in excess with 2×SSCT. A glass coverslip was placed on top of the wells to minimize evaporation. The cells were imaged under 2×SSCT.

[0656] FIGS. 16A-16B shows a summary of classification accuracy for this example. As shown in FIG. 17, bacteria fluorescence matches the expected barcode. In each well a mask for the most abundant barcode applied to the maximum spectral projection. Fluorescent bacteria only appear in channels corresponding to the “1” bit.

[0657] Microscopy

[0658] As indicated above, in each round, imaging using confocal microscopy (Zeiss i880 confocal microscope) with emission collected was collected on a spectral detector between roughly the excitation wavelength and 693 nm in 8.9 nm bins. A Plan-Apochromat 63×/1.4 Oil DIC M27 was used and collected data as 2000×2000 pixel images (134.95 μm×134.95 μm). The laser settings for the example were as shown in Table 6 below.

TABLE 6
Laser settings

| | | | | Pixel | | | | | | |
|---|---|---|---|---|---|---|---|---|---|---|
| Laser | | Pinhole | Laser | Dwell | | | | | | |
| Excitation | | Size | Power | Time | Bit | Scanning | Scanning | Master | Digital | Digital |
| (nm) | Laser | (nm) | (%) | (μsec) | Depth | Direction | Repeats | Gain | Offset | Gain |
| 488 | Argon | 56.0 | 0.5 | 2.1 | 16-bit | Bidirectional | 4 | 800 | 0 | 1 |
| 514 | Argon | 58.0 | 1.5 | 2.1 | 16-bit | Bidirectional | 4 | 800 | 0 | 1 |
| 561 | DPSS | 60.0 | 0.125 | 2.1 | 16-bit | Bidirectional | 4 | 800 | 0 | 1 |
| | 561-10 | | | | | | | | | |
| 633 | HeNe633 | 64.0 | 1.5 | 2.1 | 16-bit | Bidirectional | 4 | 800 | 0 | 1 |

[0659] The encoding, readout, and exchange probes used in this example are shown in table 7 below.

TABLE 7
Encoding, readout, and exchange probes used in Example 11

| SEQ ID NO: | Probe Name | Sequence (in 5′ to 3′ order) |
|---|---|---|
| 597 | Readout Probe 11 | /5Alex532/CCCAACTACCCATATTAACACACCC |
| 598 | Readout Probe 12 | /56-ROXN/CCCTTCTCACTAAATTCCAACACCC |
| 599 | Readout Probe 13 | /5Alex647N/CACCCTCATATCTATTACCCTCCCA |
| 600 | Readout Probe 14 | /5Alex488N/TCCCTCCTTACTATTACACTCACCC |
| 601 | Readout Probe 15 | /5Alex532/CATCCCTCCTTATTATCCTCATCCC |
| 602 | Readout Probe 16 | /5Alex546N/CCCTTCTACTACTTCCATACATCCC |
| 603 | Readout Probe 17 | /56-ROXN/CCCTTCTAATCCTATACACTCACCC |
| 604 | Readout Probe 18 | /5Alex488N/CCCATCTCTCTAATTCTACTCCACC |
| 605 | Readout Probe 19 | /5Alex532/TCCCTCCTCTTAATACATCCTCCTC |
| 606 | Readout Probe 20 | /56-ROXN/CATCCCTACTTACTTATCCTCCACC |
| 607 | Readout Probe 21 | /5Alex647N/CCCTTCTCCATAACTATACCCTTCC |
| 608 | Exchange Probe 5 | GGGTGTGTTAATATGGGTAGTTGGG |
| 609 | Exchange Probe 8 | GGGTGTTGGAATTTAGTGAGAAGGG |
| 610 | Exchange Probe 10 | TGGGAGGGTAATAGATATGAGGGTG |
| 611 | Exchange Probe 14 | GGGTGAGTGTAATAGTAAGGAGGGA |
| 612 | Exchange Probe 15 | GGGATGAGGATAATAAGGAGGGATG |
| 613 | Exchange Probe 17 | GGGATGTATGGAAGTAGTAGAAGGG |
| 614 | Exchange Probe 18 | GGGTGAGTGTATAGGATTAGAAGGG |
| 615 | Exchange Probe 24 | GGTGGAGTAGAATTAGAGAGATGGG |
| 616 | Exchange Probe 25 | GAGGAGGATGTATTAAGAGGAGGGA |
| 617 | Exchange Probe 28 | GGTGGAGGATAAGTAAGTAGGGATG |
| 618 | Exchange Probe 30 | GGAAGGGTATAGTTATGGAGAAGGG |
| 619 | Encoding Probe 581 | *CCTCAGTTAATGATAGTGTGTCGATTG |
| 620 | Encoding Probe 582 | *GGAGCCTTGGTTTTCCGGATTACG |
| 621 | Encoding Probe 583 | *GTGTCTCATCTCTGAAAACTTCCCAC |
| 622 | Encoding Probe 584 | *GTCACCCCATTAAGAGGCTCCGTG |
| 623 | Encoding Probe 585 | *CCACGTCAATGAGCAAAGGTAAAT |
| 624 | Encoding Probe 586 | *GTAAGCTCACAATATGTGCATAAA |
| 625 | Encoding Probe 587 | *GATACACACACTGATTCAGGCAGA |
| 626 | Encoding Probe 588 | *AGTCTTGGTTTTCCGGATTTGGGA |
| 627 | Encoding Probe 589 | *ACCTCAGTTAATGATAGTGTGTCGTTT |
| 628 | Encoding Probe 590 | *GAGCCTTGGTTTTCCGGATTTCGG |
| 629 | Encoding Probe 591 | *GTATCATCTCTGAAAACTTCCGACC |
| 630 | Encoding Probe 592 | *GTGCTCAGCCTTGGTTTTCCGCTA |
| 631 | Encoding Probe 593 | *TGCGTCACCCCATTAAGAGGCAGG |
| 632 | Encoding Probe 594 | *CATGTCAATGAGCAAAGGTATTAAGAA |
| 633 | Encoding Probe 595 | *GTAAGCTCACAATATGTGCATTAAA |
| 634 | Encoding Probe 596 | *GAAACTAACACACACACTGATTGTC |
| 635 | Encoding Probe 597 | *CTAAGTTAATGATAGTGTGTCGATTG |
| 636 | Encoding Probe 598 | *GTGTCTCATCTCTGAAAACTTCCGACC |
| 637 | Encoding Probe 599 | *AGGAAGGCACATTCTCATCTCACT |
| 638 | Encoding Probe 600 | *CGTCACCCCATTAAGAGGCTCGGT |
| 639 | Encoding Probe 601 | *GCGTCACCCCATTAAGAGGCTAGG |
| 640 | Encoding Probe 602 | *CATGTCAATGAGCAAAGGTATTATGA |
| 641 | Encoding Probe 603 | *TAGGCTCACAATATGTGCATTAAA |
| 642 | Encoding Probe 604 | *TGACACACACACTGATTCAGGGAG |
| 1810 | Landing Pad 11 | TTAATATGGGTAGTTGGG- |
| 1811 | Landing Pad 12 | GGAATTTAGTGAGAAGGG- |
| 1812 | Landing Pad 13 | GTAATAGATATGAGGGTG- |
| 1813 | Landing Pad 14 | TGTAATAGTAAGGAGGGA- |
| 1814 | Landing Pad 15 | GGATAATAAGGAGGGATG- |
| 1815 | Landing Pad 16 | ATGGAAGTAGTAGAAGGG- |
| 1816 | Landing Pad 17 | TGTATAGGATTAGAAGGG- |
| 1817 | Landing Pad 18 | TAGAATTAGAGAGATGGG- |
| 1818 | Landing Pad 19 | ATGTATTAAGAGGAGGGA- |
| 1819 | Landing Pad 20 | GATAAGTAAGTAGGGATG- |
| 1820 | Landing Pad 21 | TATAGTTATGGAGAAGGG- |

The asterisk (*) represents the concatenated landing pad sequence for each combination (C#). For instance, in C11, each of the encoding probes 581-604 has the sequence of landing pad 11 appended to its 3′ end. For example, Encoding Probe 581 when present in C11, would have a sequence of TTAATATGGGTAGTTGGGCCTCAGTTAATGATAGTGTGTCGATTG (SEQ ID NO: 1821) corresponding to Landing Pad 11 + Encoding Probe 581 as shown in the table. For C12, each of the encoding probes 581-604 has the sequence of landing pad 12 appended to its 3′ end, and so on. The dash (-) on each landing pad sequence represents the point of attachment to the encoding probe.

### Example 12. Phylum-Level Swap in Tissue Samples

[0660] To examine the ability to perform HiPR-Swap on a tissue specimen (colon of a healthy mouse) probes were designed to perform a simple taxon identification experiment, barcoding the six most abundant bacteria phyla with either one or two readout probes, such that each readout probe was only present in one of three imaging rounds. As shown in FIG. 18, we identified each phylum targeted (Bacteroidota, Verrucomicrobia, Actinobacteria, Firmicutes, Mycoplasmatota, and Proteobacteria). The two most abundant taxa were confirmed to be Firmicutes and Bacteroidota, as expected. Taxonomy of each segmented microbe was classified the across each round of imaging, finding that it was possible to accurately identify over 90% of fluorescently labeled bacteria in each image, and deriving similar abundance measurements for taxa labeled in different rounds (e.g. roughly 50% of bacteria identified as Bacteroidota in both rounds 1 and 3).

[0661] Phylum-level swap protocol: OCT (optimal cutting temperature)-embedded formalin-fixed tissue was sectioned at 10-micron thickness onto circular glass coverslips made for Bioptechs FCS2 flow cell. The tissue was covered with 2% formaldehyde for two hours at room temperature to fix the sample. The sample was washed by removing the buffer and replacing it with 1×PBS for 5 minutes (this was repeated two more times). The fixed tissue specimen was stored in 70% ethanol at 4° C. overnight. The following buffers were prepared:
[0662] Encoding buffer: Encoding probes (204 per taxa); 2×sodium chloride sodium citrate (SSC), 5×Denhardt's solution, 10% dextran sulfate, 10% ethylene carbonate, and 0.01% sodium dodecyl sulfate (SDS)
[0663] Round 1 readout buffer: 400 nM each of readout probes: 11+13+9; 2×sodium chloride sodium citrate (SSC), 5×Denhardt's solution, 10% dextran sulfate, 10% ethylene carbonate, and 0.01% sodium dodecyl sulfate (SDS)
[0664] Round 2 readout buffer: 10 uM each of exchange probe: 5+10, 400 nM each of readout probes 14+16+17, 2×sodium chloride sodium citrate (SSC), 5×Denhardt's solution, 10% dextran sulfate, 10% ethylene carbonate, and 0.01% sodium dodecyl sulfate (SDS)
[0665] Round 3 readout buffer: 10 uM each of exchange probe: 14+17+18, 400 nM each of readout probes: 19-21, 2×sodium chloride sodium citrate (SSC), 5×Denhardt's solution, 10% dextran sulfate, 10% ethylene carbonate, 0.01% sodium dodecyl sulfate (SDS)
[0666] Wash buffer: 215 mM NaCl, 20 mM Tris-HCl (pH 7.5), 5 mM EDTA

[0667] Place 10 mg/mL lysozyme to completely cover the specimen and incubate for 30 minutes at 37° C. in a humidified chamber. Wash the specimen with 1×PBS for 15 minutes at room temperature. Dry the specimen by submerging it in 100% ethanol and allowing it to air dry. Place the coverslip on the FCS2 flow cell (Bioptechs) and assemble. Place the flow cell assembly on the microscope stage (Zeiss i880 confocal). Connect the flow cell input port to the Aria Automated Perfusion System (Fluigent). Calibrate the Aria Automated Perfusion System using DI water. Load encoding, readout buffers, wash buffer, 1×PBS buffer, 5×SSC+DAPI buffer (40 ng/mL DAPI in 5×SSC), and 2×SSC buffer into Aria Automated Perfusion System at the desired reservoir locations. Execute the following sequence on the Aria:
[0668] a. Incubate the specimen with 1×PBS at room temperature for 15 minutes.
[0669] b. Incubate the specimen in the Encoding buffer at 37° C. for 2 hours.
[0670] c. Incubate the specimen in the Wash buffer at 42° C. for 15 minutes.
[0671] d. Incubate the specimen in the Round 1 readout buffer at 37° C. for 1 hour.
[0672] e. Incubate the specimen in the Wash buffer at 42° C. for 15 minutes.
[0673] f. Incubate the specimen in 5×SSC+DAPI at room temperature for 15 minutes.
[0674] g. Flush the specimen with 2×SSC for imaging.
[0675] h. Perform image acquisition, exciting the specimen with 633 nm, 561 nm, 514 nm, 488 nm, and 405 nm lines and collect spectra.
[0676] i. Incubate the specimen in the Round 2 readout buffer at 37° C. for 1 hour.
[0677] j. Repeat steps e-h.
[0678] k. Incubate the specimen in the Round 3 readout buffer at 37° C. for 1 hour.
[0679] l. Repeat steps e-h.

[0680] Table 8 shows the encoding, readout, and exchange probe sequences used in this example.

TABLE 8
Encoding, readout, and exchange probe sequences used in Example 12

| SEQ ID | | |
|---|---|---|
| NO: | Probe Name | Sequence (in 5′ to 3′ order) |
| 597 | Readout Probe 11 | /5Alex532/CCCAACTACCCATATTAACACACCC |
| 9 | Readout Probe 9 | /5Alex405N/TTCTCCCTCTATCAACTCTA |
| 599 | Readout Probe 13 | /5Alex647N/CACCCTCATATCTATTACCCTCCCA |
| 600 | Readout Probe 14 | /5Alex488N/TCCCTCCTTACTATTACACTCACCC |
| 602 | Readout Probe 16 | /5Alex546N/CCCTTCTACTACTTCCATACATCCC |
| 603 | Readout Probe 17 | /56-ROXN/CCCTTCTAATCCTATACACTCACCC |
| 605 | Readout Probe 19 | /5Alex532/TCCCTCCTCTTAATACATCCTCCTC |
| 606 | Readout Probe 20 | /56-ROXN/CATCCCTACTTACTTATCCTCCACC |
| 607 | Readout Probe 21 | /5Alex647N/CCCTTCTCCATAACTATACCCTTCC |
| 608 | Exchange Probe 5 | GGGTGTGTTAATATGGGTAGTTGGG |
| 610 | Exchange Probe 10 | TGGGAGGGTAATAGATATGAGGGTG |
| 611 | Exchange Probe 14 | GGGTGAGTGTAATAGTAAGGAGGGA |
| 613 | Exchange Probe 17 | GGGATGTATGGAAGTAGTAGAAGGG |
| 614 | Exchange Probe 18 | GGGTGAGTGTATAGGATTAGAAGGG |
| 616 | Exchange Probe 25 | GAGGAGGATGTATTAAGAGGAGGGA |
| 617 | Exchange Probe 28 | GGTGGAGGATAAGTAAGTAGGGATG |
| 618 | Exchange Probe 30 | GGAAGGGTATAGTTATGGAGAAGGG |
| 643 | Encoding Probe 605 | TTAATATGGGTAGTTGGGTGGATGCCCCTCGACT |
| | | TGCATGACA |
| 644 | Encoding Probe 606 | TTAATATGGGTAGTTGGGACAGGGACCTTCCTCT |
| | | CAGAAAGG |
| 645 | Encoding Probe 607 | TTAATATGGGTAGTTGGGCGTGAGTTAGCCGAT |
| | | GCTTTTAGA |
| 646 | Encoding Probe 608 | TTAATATGGGTAGTTGGGCATCTGCCTTCGCAAT |
| | | CGGAGAAG |
| 647 | Encoding Probe 609 | TTAATATGGGTAGTTGGGTCCCCTCGCGTATCAT |
| | | CGAATATT |
| 648 | Encoding Probe 610 | TTAATATGGGTAGTTGGGCCCTGCGCTCGTTATG |
| | | GCACTATT |
| 649 | Encoding Probe 611 | TTAATATGGGTAGTTGGGTGTACTGATGCGCGAT |
| | | TACTAGGCT |
| 650 | Encoding Probe 612 | TTAATATGGGTAGTTGGGTGGCGGCTTCCATGGC |
| | | TTGACCCC |
| 651 | Encoding Probe 613 | TTAATATGGGTAGTTGGGTGCTTGCATGTGTTAA |
| | | GCCTGTGCG |
| 652 | Encoding Probe 614 | TTAATATGGGTAGTTGGGCCCACCTTCCTCTCAG |
| | | AACCCGAT |
| 653 | Encoding Probe 615 | GATAAGTAAGTAGGGATGGGATGCCCCTCGACT |
| | | TGCATGACA |
| 654 | Encoding Probe 616 | GATAAGTAAGTAGGGATGACAGGGACCTTCCTC |
| | | TCAGAAAGG |
| 655 | Encoding Probe 617 | GATAAGTAAGTAGGGATGCGTGAGTTAGCCGAT |
| | | GCTTTTAGA |
| 656 | Encoding Probe 618 | GATAAGTAAGTAGGGATGCATCTGCCTTCGCAA |
| | | TCGGAGAAG |
| 657 | Encoding Probe 619 | GATAAGTAAGTAGGGATGTCCCCTCGCGTATCA |
| | | TCGAATATT |
| 658 | Encoding Probe 620 | GATAAGTAAGTAGGGATGCCCTGCGCTCGTTAT |
| | | GGCACTATT |
| 659 | Encoding Probe 621 | GATAAGTAAGTAGGGATGGTACTGATGCGCGAT |
| | | TACTAGGCT |
| 660 | Encoding Probe 622 | GATAAGTAAGTAGGGATGTGGCGGCTTCCATGG |
| | | CTTGACCCC |
| 661 | Encoding Probe 623 | GATAAGTAAGTAGGGATGGCTTGCATGTGTTAA |
| | | GCCTGTGCG |
| 662 | Encoding Probe 624 | GATAAGTAAGTAGGGATGCCCACCTTCCTCTCA |
| | | GAACCCGAT |
| 663 | Encoding Probe 625 | ATGGAAGTAGTAGAAGGGTCCCAGGTTGGTCAC |
| | | GTGTTAGAG |
| 664 | Encoding Probe 626 | ATGGAAGTAGTAGAAGGGTGGACCTACTACCTA |
| | | ATGGGCCCGC |
| 665 | Encoding Probe 627 | ATGGAAGTAGTAGAAGGGTGAACTGCTGAAAGC |
| | | GGTTTACTTG |
| 666 | Encoding Probe 628 | ATGGAAGTAGTAGAAGGGAAGGATATCTGCGCA |
| | | TTCCACGCG |
| 667 | Encoding Probe 629 | ATGGAAGTAGTAGAAGGGTAATTTGAGTTTTAG |
| | | CCTTGCCCG |
| 668 | Encoding Probe 630 | ATGGAAGTAGTAGAAGGGTGAATGCTGGCAACA |
| | | CGGGACTCC |
| 669 | Encoding Probe 631 | ATGGAAGTAGTAGAAGGGCCGCGGGTGCAGAC |
| | | GACTCGGCAC |
| 670 | Encoding Probe 632 | ATGGAAGTAGTAGAAGGGTGGAACCCTCCACAC |
| | | CTTCGACCGG |
| 671 | Encoding Probe 633 | ATGGAAGTAGTAGAAGGGCCCAGGTTGGTCACG |
| | | TGTTACAGT |
| 672 | Encoding Probe 634 | ATGGAAGTAGTAGAAGGGTGGACTACTACCTAA |
| | | TGGGCCGGCT |
| 673 | Encoding Probe 635 | TAGAATTAGAGAGATGGGTCCCAGGTTGGTCAC |
| | | GTGTTAGAG |
| 674 | Encoding Probe 636 | TAGAATTAGAGAGATGGGTGGACCTACTACCTA |
| | | ATGGGCCCGC |
| 675 | Encoding Probe 637 | TAGAATTAGAGAGATGGGTGAACTGCTGAAAGC |
| | | GGTTTACTTG |
| 676 | Encoding Probe 638 | TAGAATTAGAGAGATGGGAAGGATATCTGCGCA |
| | | TTCCACGCG |
| 677 | Encoding Probe 639 | TAGAATTAGAGAGATGGGTAATTTGAGTTTTAG |
| | | CCTTGCCCG |
| 678 | Encoding Probe 640 | TAGAATTAGAGAGATGGGTGAATGCTGGCAACA |
| | | CGGGACTCC |
| 679 | Encoding Probe 641 | TAGAATTAGAGAGATGGGCCGCGGGTGCAGACG |
| | | ACTCGGCAC |
| 680 | Encoding Probe 642 | TAGAATTAGAGAGATGGGTGGAACCCTCCACAC |
| | | CTTCGACCGG |
| 681 | Encoding Probe 643 | TAGAATTAGAGAGATGGGCCCAGGTTGGTCACG |
| | | TGTTACAGT |
| 682 | Encoding Probe 644 | TAGAATTAGAGAGATGGGTGGACTACTACCTAA |
| | | TGGGCCGGCT |
| 683 | Encoding Probe 645 | GGAATTTAGTGAGAAGGGTTATTCGATACTATG |
| | | CGGTATTTTA |
| 684 | Encoding Probe 646 | GGAATTTAGTGAGAAGGGCAACCCCATTGTGAA |
| | | TGATTCTGCT |
| 685 | Encoding Probe 647 | GGAATTTAGTGAGAAGGGTGGACCATTACTCTA |
| | | GTCTCGCTCA |
| 686 | Encoding Probe 648 | GGAATTTAGTGAGAAGGGCACCCTCTCGATATC |
| | | TACGCAAAA |
| 687 | Encoding Probe 649 | GGAATTTAGTGAGAAGGGTGCGCCGAAGAGTCG |
| | | CATGCTTAGT |
| 688 | Encoding Probe 650 | GGAATTTAGTGAGAAGGGTGGAGGCATAAGGGC |
| | | CATACTGTGG |
| 689 | Encoding Probe 651 | GGAATTTAGTGAGAAGGGCGCTGGCTTCAGATA |
| | | CTTCGGCAC |
| 690 | Encoding Probe 652 | GGAATTTAGTGAGAAGGGTGGTTACCAGTCTCA |
| | | CCTTAGGTGG |
| 691 | Encoding Probe 653 | GGAATTTAGTGAGAAGGGTTATTCGATACTATG |
| | | CGGTATTATAG |
| 692 | Encoding Probe 654 | GGAATTTAGTGAGAAGGGAAACCCATTGTGAAT |
| | | GATTCTCCTG |
| 693 | Encoding Probe 655 | TGTAATAGTAAGGAGGGATTATTCGATACTATG |
| | | CGGTATTTTA |
| 694 | Encoding Probe 656 | TGTAATAGTAAGGAGGGACAACCCCATTGTGAA |
| | | TGATTCTGCT |
| 695 | Encoding Probe 657 | TGTAATAGTAAGGAGGGAGGACCATTACTCTAG |
| | | TCTCGCTCA |
| 696 | Encoding Probe 658 | TGTAATAGTAAGGAGGGACACCCTCTCGATATC |
| | | TACGCAAAA |
| 697 | Encoding Probe 659 | TGTAATAGTAAGGAGGGAGCGCCGAAGAGTCGC |
| | | ATGCTTAGT |
| 698 | Encoding Probe 660 | TGTAATAGTAAGGAGGGAGGAGGCATAAGGGC |
| | | CATACTGTGG |
| 699 | Encoding Probe 661 | TGTAATAGTAAGGAGGGACGCTGGCTTCAGATA |
| | | CTTCGGCAC |
| 700 | Encoding Probe 662 | TGTAATAGTAAGGAGGGAGGTTACCAGTCTCAC |
| | | CTTAGGTGG |
| 701 | Encoding Probe 663 | TGTAATAGTAAGGAGGGATTATTCGATACTATG |
| | | CGGTATTATAG |
| 702 | Encoding Probe 664 | TGTAATAGTAAGGAGGGAAAACCCATTGTGAAT |
| | | GATTCTCCTG |
| 703 | Encoding Probe 665 | GTAATAGATATGAGGGTGTAGCGCGTTACTCAC |
| | | CCGTCCCGG |
| 704 | Encoding Probe 666 | GTAATAGATATGAGGGTGAACGAAGATTCCCTA |
| | | CTGCTGGGA |
| 705 | Encoding Probe 667 | GTAATAGATATGAGGGTGGCGGCCACCTACGTA |
| | | TTACCGGCC |
| 706 | Encoding Probe 668 | GTAATAGATATGAGGGTGAAGCGCTACACTAGG |
| | | AATTCCCGA |
| 707 | Encoding Probe 669 | GTAATAGATATGAGGGTGGCGTGCTTCGAATTA |
| | | AACCACTAC |
| 708 | Encoding Probe 670 | GTAATAGATATGAGGGTGAACGGACTTAACCCA |
| | | ACATCTGTG |
| 709 | Encoding Probe 671 | GTAATAGATATGAGGGTGGGTCATTGTAGCACG |
| | | TGTGTACGG |
| 710 | Encoding Probe 672 | GTAATAGATATGAGGGTGTGTCTCTCATGGTGTG |
| | | ACGGGACC |
| 711 | Encoding Probe 673 | GTAATAGATATGAGGGTGACGACGCGTTACTCA |
| | | CCCGTCGCG |
| 712 | Encoding Probe 674 | GTAATAGATATGAGGGTGCAACCCTCTCAGGTC |
| | | GGCTACCGT |
| 713 | Encoding Probe 675 | ATGTATTAAGAGGAGGGATAGCGCGTTACTCAC |
| | | CCGTCCCGG |
| 714 | Encoding Probe 676 | ATGTATTAAGAGGAGGGAAACGAAGATTCCCTA |
| | | CTGCTGGGA |
| 715 | Encoding Probe 677 | ATGTATTAAGAGGAGGGAGCGGCCACCTACGTA |
| | | TTACCGGCC |
| 716 | Encoding Probe 678 | ATGTATTAAGAGGAGGGAAAGCGCTACACTAGG |
| | | AATTCCCGA |
| 717 | Encoding Probe 679 | ATGTATTAAGAGGAGGGAGCGTGCTTCGAATTA |
| | | AACCACTAC |
| 718 | Encoding Probe 680 | ATGTATTAAGAGGAGGGAAACGGACTTAACCCA |
| | | ACATCTGTG |
| 719 | Encoding Probe 681 | ATGTATTAAGAGGAGGGAGGTCATTGTAGCACG |
| | | TGTGTACGG |
| 720 | Encoding Probe 682 | ATGTATTAAGAGGAGGGATGTCTCTCATGGTGT |
| | | GACGGGACC |
| 721 | Encoding Probe 683 | ATGTATTAAGAGGAGGGAACGACGCGTTACTCA |
| | | CCCGTCGCG |
| 722 | Encoding Probe 684 | ATGTATTAAGAGGAGGGACAACCCTCTCAGGTC |
| | | GGCTACCGT |
| 723 | Encoding Probe 685 | GGTAATTGAGTAGAAGGGTGTCCCCTCCTTAAG |
| | | CAGATCTGAG |
| 724 | Encoding Probe 686 | GGTAATTGAGTAGAAGGGTGTACGAATAACTTC |
| | | TTCGTTCAGCG |
| 725 | Encoding Probe 687 | GGTAATTGAGTAGAAGGGTCTTACTATGCCATCT |
| | | ACGCAAGG |
| 726 | Encoding Probe 688 | GGTAATTGAGTAGAAGGGTGACCTCTGTCATAC |
| | | TCTAGCTAAC |
| 727 | Encoding Probe 689 | GGTAATTGAGTAGAAGGGTGTGCCTGTATGCAC |
| | | GCTATCCAGG |
| 728 | Encoding Probe 690 | GGTAATTGAGTAGAAGGGCGAGGTCATATAGGG |
| | | CATGATGTAA |
| 729 | Encoding Probe 691 | GGTAATTGAGTAGAAGGGTGCTCCATCTTCATG |
| | | AAGTCGACAA |
| 730 | Encoding Probe 692 | GGTAATTGAGTAGAAGGGTGCTCCCTCTTTCGTT |
| | | AGGCCTGG |
| 731 | Encoding Probe 693 | GGTAATTGAGTAGAAGGGCGACCTCGTCTTAAG |
| | | GGTAGGAAT |
| 732 | Encoding Probe 694 | GGTAATTGAGTAGAAGGGTGTACGAATAACTTC |
| | | TTCGTTCTGC |
| 733 | Encoding Probe 695 | TTGTAAAATAGGGAGGGAGTCCCCTCCTTAAGC |
| | | AGATCTGAG |
| 734 | Encoding Probe 696 | TTGTAAAATAGGGAGGGAGTACGAATAACTTCT |
| | | TCGTTCAGCG |
| 735 | Encoding Probe 697 | TTGTAAAATAGGGAGGGATCTTACTATGCCATCT |
| | | ACGCAAGG |
| 736 | Encoding Probe 698 | TTGTAAAATAGGGAGGGATGACCTCTGTCATAC |
| | | TCTAGCTAAC |
| 737 | Encoding Probe 699 | TTGTAAAATAGGGAGGGAGTGCCTGTATGCACG |
| | | CTATCCAGG |
| 738 | Encoding Probe 700 | TTGTAAAATAGGGAGGGACGAGGTCATATAGGG |
| | | CATGATGTAA |
| 739 | Encoding Probe 701 | TTGTAAAATAGGGAGGGAGCTCCATCTTCATGA |
| | | AGTCGACAA |
| 740 | Encoding Probe 702 | TTGTAAAATAGGGAGGGATGCTCCCTCTTTCGTT |
| | | AGGCCTGG |
| 741 | Encoding Probe 703 | TTGTAAAATAGGGAGGGACGACCTCGTCTTAAG |
| | | GGTAGGAAT |
| 742 | Encoding Probe 704 | TTGTAAAATAGGGAGGGATGTACGAATAACTTC |
| | | TTCGTTCTGC |
| 743 | Encoding Probe 705 | TGTATAGGATTAGAAGGGACACCCACGAGCGGA |
| | | CACGTTGGC |
| 744 | Encoding Probe 706 | TGTATAGGATTAGAAGGGTGTGGGAATAGCTGG |
| | | ATCAGGCAAC |
| 745 | Encoding Probe 707 | TGTATAGGATTAGAAGGGCAACCGGTGCTTATT |
| | | CTTAGAGATG |
| 746 | Encoding Probe 708 | TGTATAGGATTAGAAGGGTGTGCCCTCTGACAC |
| | | ACTCTAGAGC |
| 747 | Encoding Probe 709 | TGTATAGGATTAGAAGGGAATAGAGCTTCCTGA |
| | | CATGTCTTC |
| 748 | Encoding Probe 710 | TGTATAGGATTAGAAGGGTGGATCGTAGCAACT |
| | | AGTGACATCC |
| 749 | Encoding Probe 711 | TGTATAGGATTAGAAGGGTGACATCCGGACTAC |
| | | GATCGGTAAA |
| 750 | Encoding Probe 712 | TGTATAGGATTAGAAGGGCCAGGCTAACGACTT |
| | | CTGGTATTG |
| 751 | Encoding Probe 713 | TGTATAGGATTAGAAGGGAACCCCCACGAGCGG |
| | | ACACGTAGG |
| 752 | Encoding Probe 714 | TGTATAGGATTAGAAGGGTGCGAATAGCTGGAT |
| | | CAGGCTTCGC |
| 753 | Encoding Probe 715 | TATAGTTATGGAGAAGGGACACCCACGAGCGGA |
| | | CACGTTGGC |
| 754 | Encoding Probe 716 | TATAGTTATGGAGAAGGGTGTGGGAATAGCTGG |
| | | ATCAGGCAAC |
| 755 | Encoding Probe 717 | TATAGTTATGGAGAAGGGCAACCGGTGCTTATT |
| | | CTTAGAGATG |
| 756 | Encoding Probe 718 | TATAGTTATGGAGAAGGGTGTGCCCTCTGACAC |
| | | ACTCTAGAGC |
| 757 | Encoding Probe 719 | TATAGTTATGGAGAAGGGAATAGAGCTTCCTGA |
| | | CATGTCTTC |
| 758 | Encoding Probe 720 | TATAGTTATGGAGAAGGGTGGATCGTAGCAACT |
| | | AGTGACATCC |
| 759 | Encoding Probe 721 | TATAGTTATGGAGAAGGGTGACATCCGGACTAC |
| | | GATCGGTAAA |
| 760 | Encoding Probe 722 | TATAGTTATGGAGAAGGGCCAGGCTAACGACTT |
| | | CTGGTATTG |
| 761 | Encoding Probe 723 | TATAGTTATGGAGAAGGGAACCCCCACGAGCGG |
| | | ACACGTAGG |
| 762 | Encoding Probe 724 | TATAGTTATGGAGAAGGGTGCGAATAGCTGGAT |
| | | CAGGCTTCGC |

### Example 13. Species-Level Swap in Tissue Samples

[0681] To extend the ability to perform HiPR-Swap at the phylum level on a tissue specimen (colon of a healthy mouse) to the species level probes to perform a simple taxon identification experiment were designed, barcoding the sixty-five most abundant species in healthy mouse stool (measured internally by PacBio 16S long-read sequencing). As shown in FIG. 19, we were able to identified several dozen species. Signal exchange correctly matched expectations for taxa present in the encoding panel.

[0682] Species-level swap protocol: OCT-embedded formalin-fixed tissue was sectioned at 10-micron thickness onto circular glass coverslips made for Bioptechs FCS2 flow cell. The tissue was covered with 2% formaldehyde for two hours at room temperature to fix the sample. The sample was washed by removing the buffer and replacing it with 1×PBS for 5 minutes (this was repeated two more times). The fixed tissue specimen was stored in 70% ethanol at 4° C. overnight. The following buffers were prepared:
[0683] Encoding buffer: Encoding probes (100 nM of each encoding probe in complex pool, 5 nM of blocking probes in the complex probe pool+EUB at 1 μM); 2× sodium chloride sodium citrate (SSC); 5×Denhardt's solution; 10% dextran sulfate; 10% ethylene carbonate; and 0.01% sodium dodecyl sulfate (SDS)
[0684] Round 1 readout buffer: 400 nM each of readout probes: 21, 11, 22, 12, 13, and 9; 2× sodium chloride sodium citrate (SSC); 5×Denhardt's solution; 10% dextran sulfate; 10% ethylene carbonate; and 0.01% sodium dodecyl sulfate (SDS)
[0685] Round 2 readout buffer: 10 μM each of exchange probe: 4-5, 7-8, and 10; 400 nM each of readout probes: 14, 24, 16, 17, and 23; 2× sodium chloride sodium citrate (SSC); 5×Denhardt's solution; 10% dextran sulfate; 10% ethylene carbonate; and 0.01% sodium dodecyl sulfate (SDS)
[0686] Round 3 readout buffer: 10 μM each of exchange probe: 14, 21, 17-18, and 20; 400 nM each of readout probes: 18, 19, 25, 20, and 21; 2× sodium chloride sodium citrate (SSC); 5×Denhardt's solution; 10% dextran sulfate; 10% ethylene carbonate; 0.01% sodium dodecyl sulfate (SDS)
[0687] Wash buffer: 215 mM NaCl; 20 mM Tris-HCl (pH 7.5); and 5 mM EDTA

[0688] Place 10 mg/mL lysozyme to completely cover the specimen and incubate for 30 minutes at 37° C. in a humidified chamber. Wash the specimen with 1×PBS for 15 minutes at room temperature. Dry the specimen by submerging it in 100% ethanol and allowing it to air dry. Place the coverslip on the FCS2 flow cell (Bioptechs) and assemble. Place the flow cell assembly on the microscope stage (Zeiss i880 confocal). Connect the flow cell input port to the Aria Automated Perfusion System (Fluigent). Calibrate the Aria Automated Perfusion System using DI water. Load encoding, readout buffers, wash buffer, 1×PBS buffer, 5×SSC+DAPI buffer (40 ng/mL DAPI in 5×SSC), and 2×SSC buffer into Aria Automated Perfusion System at the desired reservoir locations. Execute the following sequence on the Aria:
[0689] a. Incubate the specimen with 1×PBS at room temperature for 15 minutes.
[0690] b. Incubate the specimen in the Encoding buffer at 37° C. for 2 hours.
[0691] c. Incubate the specimen in the Wash buffer at 42° C. for 15 minutes.
[0692] d. Incubate the specimen in the Round 1 readout buffer at 37° C. for 1 hour.
[0693] e. Incubate the specimen in the Wash buffer at 42° C. for 15 minutes.
[0694] f. Incubate the specimen in 5×SSC+DAPI at room temperature for 15 minutes.
[0695] g. Flush the specimen with 2×SSC for imaging.
[0696] h. Perform image acquisition, exciting the specimen with 633 nm, 561 nm, 514 nm, 488 nm, and 405 nm lines and collect spectra.
[0697] i. Incubate the specimen in the Round 2 readout buffer at 37° C. for 1 hour.
[0698] j. Repeat steps e-h.
[0699] k. Incubate the specimen in the Round 3 readout buffer at 37° C. for 1 hour.
[0700] l. Repeat steps e-h.

[0701] Table 9 shows the encoding, readout, and exchange probe sequences used in this example.

TABLE 9
Encoding, readout, and exchange probe sequences used in Example 13

| SEQ ID | | |
|---|---|---|
| NO: | Probe Name | Sequence (in 5′ to 3′ order) |
| 763 | Readout Probe | /5Alex488N/CCCTTCTACTCAATTACCTCATCCC |
| | 21 | |
| 597 | Readout Probe | /5Alex532/CCCAACTACCCATATTAACACACCC |
| | 11 | |
| 764 | Readout Probe | /5Alex546N/CCCATCTCACTATCTTATCACCCAC |
| | 22 | |
| 598 | Readout Probe | /56-ROXN/CCCTTCTCACTAAATTCCAACACCC |
| | 12 | |
| 9 | Readout Probe | /5Alex405N/TTCTCCCTCTATCAACTCTA |
| | 9 | |
| 599 | Readout Probe | /5Alex647N/CACCCTCATATCTATTACCCTCCCA |
| | 13 | |
| 600 | Readout Probe | /5Alex488N/TCCCTCCTTACTATTACACTCACCC |
| | 14 | |
| 602 | Readout Probe | /5Alex546N/CCCTTCTACTACTTCCATACATCCC |
| | 16 | |
| 603 | Readout Probe | /56-ROXN/CCCTTCTAATCCTATACACTCACCC |
| | 17 | |
| 765 | Readout Probe | /5Alex647N/CCCACTCAACATATCATTCCACCAC |
| | 23 | |
| 766 | Readout Probe | /5Alex532/CCCAACTATACTCTATCCTCCATCC |
| | 24 | |
| 604 | Readout Probe | /5Alex488N/CCCATCTCTCTAATTCTACTCCACC |
| | 18 | |
| 605 | Readout Probe | /5Alex532/TCCCTCCTCTTAATACATCCTCCTC |
| | 19 | |
| 767 | Readout Probe | /5Alex546N/CCTCACCCTAATAATACTCCAACCC |
| | 25 | |
| 606 | Readout Probe | /56-ROXN/CATCCCTACTTACTTATCCTCCACC |
| | 20 | |
| 607 | Readout Probe | /5Alex647N/CCCTTCTCCATAACTATACCCTTCC |
| | 21 | |
| 768 | Exchange | GGGATGAGGTAATTGAGTAGAAGGG |
| | Probe 4 | |
| 608 | Exchange | GGGTGTGTTAATATGGGTAGTTGGG |
| | Probe 5 | |
| 769 | Exchange | GTGGGTGATAAGATAGTGAGATGGG |
| | Probe 7 | |
| 609 | Exchange | GGGTGTTGGAATTTAGTGAGAAGGG |
| | Probe 8 | |
| 610 | Exchange | TGGGAGGGTAATAGATATGAGGGTG |
| | Probe 10 | |
| 611 | Exchange | GGGTGAGTGTAATAGTAAGGAGGGA |
| | Probe 14 | |
| 613 | Exchange | GGGATGTATGGAAGTAGTAGAAGGG |
| | Probe 17 | |
| 614 | Exchange | GGGTGAGTGTATAGGATTAGAAGGG |
| | Probe 18 | |
| 770 | Exchange | GTGGTGGAATGATATGTTGAGTGGG |
| | Probe 20 | |
| 771 | Exchange | GGATGGAGGATAGAGTATAGTTGGG |
| | Probe 21 | |
| 772 | Encoding | GTAATAGATATGAGGGTGCGGAGCGTCAGTAGGGC |
| | Probe 725 | GCCGCATTGGGAGGGTAATAGATAT |
| 773 | Encoding | GTAATAGATATGAGGGTGCGCACGCGGTATTAGACG |
| | Probe 726 | GAATTTGAATGGGAGGGTAATAGATAT |
| 774 | Encoding | GTAATAGATATGAGGGTGGACCCCCCGCTGCCCCTC |
| | Probe 727 | GACAACTGGGAGGGTAATAGATAT |
| 775 | Encoding | GTAATAGATATGAGGGTGCGCACGCGGTATTAGACG |
| | Probe 728 | GAATTAGATGGGAGGGTAATAGATAT |
| 776 | Encoding | GTAATAGATATGAGGGTGAATCCGCCGACTAGCTAA |
| | Probe 729 | TGCCGGTGGGAGGGTAATAGATAT |
| 777 | Encoding | GTAATAGATATGAGGGTGCGTCTTGCTCCCCGGCAA |
| | Probe 730 | AAGTCCTGGGAGGGTAATAGATAT |
| 778 | Encoding | GTAATAGATATGAGGGTGGACCCCCCGCTGCCCCTC |
| | Probe 731 | GACTACGTGGGAGGGTAATAGATAT |
| 779 | Encoding | GTAATAGATATGAGGGTGATGCGCCGACTAGCTAAT |
| | Probe 732 | GCGGGCTGGGAGGGTAATAGATAT |
| 780 | Encoding | ATGTATTAAGAGGAGGGACGGAGCGTCAGTAGGGC |
| | Probe 733 | GCCGCATGAGGAGGATGTATTAAGA |
| 781 | Encoding | ATGTATTAAGAGGAGGGACGCACGCGGTATTAGACG |
| | Probe 734 | GAATTTGAAGAGGAGGATGTATTAAGA |
| 782 | Encoding | ATGTATTAAGAGGAGGGAGACCCCCCGCTGCCCCTC |
| | Probe 735 | GACAACGAGGAGGATGTATTAAGA |
| 783 | Encoding | ATGTATTAAGAGGAGGGACGCACGCGGTATTAGACG |
| | Probe 736 | GAATTAGAGAGGAGGATGTATTAAGA |
| 784 | Encoding | ATGTATTAAGAGGAGGGAAATCCGCCGACTAGCTAA |
| | Probe 737 | TGCCGGGAGGAGGATGTATTAAGA |
| 785 | Encoding | ATGTATTAAGAGGAGGGACGTCTTGCTCCCCGGCAA |
| | Probe 738 | AAGTCCGAGGAGGATGTATTAAGA |
| 786 | Encoding | ATGTATTAAGAGGAGGGAGACCCCCCGCTGCCCCTC |
| | Probe 739 | GACTACGGAGGAGGATGTATTAAGA |
| 787 | Encoding | ATGTATTAAGAGGAGGGAATGCGCCGACTAGCTAAT |
| | Probe 740 | GCGGGCGAGGAGGATGTATTAAGA |
| 788 | Encoding | TGTAATAGTAAGGAGGGAGGCGTTAAGCCCCGGCAT |
| | Probe 741 | TTCTGAGGGTGAGTGTAATAGTAA |
| 789 | Encoding | TGTAATAGTAAGGAGGGACCACCCAACACCTAGTAA |
| | Probe 742 | TCATGCAGGGTGAGTGTAATAGTAA |
| 790 | Encoding | TGTAATAGTAAGGAGGGACTTGAAAGTGACTTTGCT |
| | Probe 743 | CACAGCGGGTGAGTGTAATAGTAA |
| 791 | Encoding | TGTAATAGTAAGGAGGGAGCAGTAGCCCTGATCATA |
| | Probe 744 | AGGCCGTGGGTGAGTGTAATAGTAA |
| 792 | Encoding | TGTAATAGTAAGGAGGGACCTCATCGTATACCACCA |
| | Probe 745 | GAGTAAAGGGTGAGTGTAATAGTAA |
| 793 | Encoding | TGTAATAGTAAGGAGGGAAGATGCACTCTAGCTGCA |
| | Probe 746 | CAGAAAGGGTGAGTGTAATAGTAA |
| 794 | Encoding | TGTAATAGTAAGGAGGGAGAGCTGCACTCTAGCTGC |
| | Probe 747 | ACACAAGGGTGAGTGTAATAGTAA |
| 795 | Encoding | TGTAATAGTAAGGAGGGACCTCATCGTATACCACCA |
| | Probe 748 | GAGAAAGGGTGAGTGTAATAGTAA |
| 796 | Encoding | TATAGTTATGGAGAAGGGTGGCGTTAAGCCCCGGCA |
| | Probe 749 | TTTCTGAGGAAGGGTATAGTTATGG |
| 797 | Encoding | TATAGTTATGGAGAAGGGCCACCCAACACCTAGTAA |
| | Probe 750 | TCATGCAGGAAGGGTATAGTTATGG |
| 798 | Encoding | TATAGTTATGGAGAAGGGCTTGAAAGTGACTTTGCT |
| | Probe 751 | CACAGCGGAAGGGTATAGTTATGG |
| 799 | Encoding | TATAGTTATGGAGAAGGGTGCAGTAGCCCTGATCAT |
| | Probe 752 | AAGGCCGGGAAGGGTATAGTTATGG |
| 800 | Encoding | TATAGTTATGGAGAAGGGCCTCATCGTATACCACCA |
| | Probe 753 | GAGTAAAGGAAGGGTATAGTTATGG |
| 801 | Encoding | TATAGTTATGGAGAAGGGAGATGCACTCTAGCTGCA |
| | Probe 754 | CAGAAAGGAAGGGTATAGTTATGG |
| 802 | Encoding | TATAGTTATGGAGAAGGGTGAGCTGCACTCTAGCTG |
| | Probe 755 | CACACAAGGAAGGGTATAGTTATGG |
| 803 | Encoding | TATAGTTATGGAGAAGGGCCTCATCGTATACCACCA |
| | Probe 756 | GAGAAAGGAAGGGTATAGTTATGG |
| 804 | Encoding | TTAATATGGGTAGTTGGGTGGAGAAAGGCAGGTTCC |
| | Probe 757 | TCACCGCGGGTGTGTTAATATGGGT |
| 805 | Encoding | TTAATATGGGTAGTTGGGTTCGTACCGTCTTCTGCTC |
| | Probe 758 | TTAGGTGGGTGTGTTAATATGGGT |
| 806 | Encoding | TTAATATGGGTAGTTGGGTCCCCGTCTTCTGCTCTTC |
| | Probe 759 | CCGGAGGGTGTGTTAATATGGGT |
| 807 | Encoding | TTAATATGGGTAGTTGGGTGGAGAAAGGCAGGTTCC |
| | Probe 760 | TCACGGCAGGGTGTGTTAATATGGGT |
| 808 | Encoding | TTAATATGGGTAGTTGGGATTCACATAATCCACCGC |
| | Probe 761 | TTGACGTGGGTGTGTTAATATGGGT |
| 809 | Encoding | TTAATATGGGTAGTTGGGCCCTCAGTCCCCGCACAC |
| | Probe 762 | CTACATGGGTGTGTTAATATGGGT |
| 810 | Encoding | TTAATATGGGTAGTTGGGTCTAACAGTTTCAAATGC |
| | Probe 763 | AGTTGTGTGGGTGTGTTAATATGGGT |
| 811 | Encoding | TTAATATGGGTAGTTGGGTGGAGGATTTCACATCTG |
| | Probe 764 | ACTTGTAAGTGGGTGTGTTAATATGGGT |
| 812 | Encoding | AATGATATGTTGAGTGGGTGGAGAAAGGCAGGTTCC |
| | Probe 765 | TCACCGCGTGGTGGAATGATATGTT |
| 813 | Encoding | AATGATATGTTGAGTGGGTTCGTACCGTCTTCTGCTC |
| | Probe 766 | TTAGGGTGGTGGAATGATATGTT |
| 814 | Encoding | AATGATATGTTGAGTGGGTCCCCGTCTTCTGCTCTTC |
| | Probe 767 | CCGGAGTGGTGGAATGATATGTT |
| 815 | Encoding | AATGATATGTTGAGTGGGTGGAGAAAGGCAGGTTCC |
| | Probe 768 | TCACGGCAGTGGTGGAATGATATGTT |
| 816 | Encoding | AATGATATGTTGAGTGGGATTCACATAATCCACCGC |
| | Probe 769 | TTGACGGTGGTGGAATGATATGTT |
| 817 | Encoding | AATGATATGTTGAGTGGGCCCTCAGTCCCCGCACAC |
| | Probe 770 | CTACATGTGGTGGAATGATATGTT |
| 818 | Encoding | AATGATATGTTGAGTGGGTCTAACAGTTTCAAATGC |
| | Probe 771 | AGTTGTGGTGGTGGAATGATATGTT |
| 819 | Encoding | AATGATATGTTGAGTGGGTGGAGGATTTCACATCTG |
| | Probe 772 | ACTTGTAAGGTGGTGGAATGATATGTT |
| 820 | Encoding | TGTATAGGATTAGAAGGGTGAGAGAACCCCTAGACA |
| | Probe 773 | TCGTGCGTGGGTGAGTGTATAGGATT |
| 821 | Encoding | TGTATAGGATTAGAAGGGACGCAGCGTCAGTTGGGC |
| | Probe 774 | GCCGCATGGGTGAGTGTATAGGATT |
| 822 | Encoding | TGTATAGGATTAGAAGGGATGAACGCTTTCGCTGTG |
| | Probe 775 | CCAAGGTGGGTGAGTGTATAGGATT |
| 823 | Encoding | TGTATAGGATTAGAAGGGTGGCAGTCTCGACAGAGT |
| | Probe 776 | CCTCTCGTGGGTGAGTGTATAGGATT |
| 824 | Encoding | TGTATAGGATTAGAAGGGACGGTGTTAGGCCTGTCG |
| | Probe 777 | CTACGCGGGTGAGTGTATAGGATT |
| 825 | Encoding | TGTATAGGATTAGAAGGGCGTTGTTAGGCCTGTCGC |
| | Probe 778 | TAGGCAGGGTGAGTGTATAGGATT |
| 826 | Encoding | TGTATAGGATTAGAAGGGCGGCTAGCTAATGTCACG |
| | Probe 779 | CATCGGTGGGTGAGTGTATAGGATT |
| 827 | Encoding | TGTATAGGATTAGAAGGGATGCTCGCCCACTCAAGA |
| | Probe 780 | CCGAGTGGGTGAGTGTATAGGATT |
| 828 | Encoding | TAGAATTAGAGAGATGGGTGAGAGAACCCCTAGAC |
| | Probe 781 | ATCGTGCGGGTGGAGTAGAATTAGAG |
| 829 | Encoding | TAGAATTAGAGAGATGGGACGCAGCGTCAGTTGGGC |
| | Probe 782 | GCCGCATGGTGGAGTAGAATTAGAG |
| 830 | Encoding | TAGAATTAGAGAGATGGGATGAACGCTTTCGCTGTG |
| | Probe 783 | CCAAGGTGGTGGAGTAGAATTAGAG |
| 831 | Encoding | TAGAATTAGAGAGATGGGTGGCAGTCTCGACAGAGT |
| | Probe 784 | CCTCTCGGGTGGAGTAGAATTAGAG |
| 832 | Encoding | TAGAATTAGAGAGATGGGACGGTGTTAGGCCTGTCG |
| | Probe 785 | CTACGCGGTGGAGTAGAATTAGAG |
| 833 | Encoding | TAGAATTAGAGAGATGGGCGTTGTTAGGCCTGTCGC |
| | Probe 786 | TAGGCAGGTGGAGTAGAATTAGAG |
| 834 | Encoding | TAGAATTAGAGAGATGGGCGGCTAGCTAATGTCACG |
| | Probe 787 | CATCGGTGGTGGAGTAGAATTAGAG |
| 835 | Encoding | TAGAATTAGAGAGATGGGATGCTCGCCCACTCAAGA |
| | Probe 788 | CCGAGTGGTGGAGTAGAATTAGAG |
| 836 | Encoding | GGAATTTAGTGAGAAGGGACGTGAAACTATACCATC |
| | Probe 789 | GGGTTAAGGGTGTTGGAATTTAGTG |
| 837 | Encoding | GGAATTTAGTGAGAAGGGTAGGCGGTGAAACTATAC |
| | Probe 790 | CATGCCGGGTGTTGGAATTTAGTG |
| 838 | Encoding | GGAATTTAGTGAGAAGGGTGTAAAAATGGTATGCAT |
| | Probe 791 | ACCAAAGAAGGGTGTTGGAATTTAGTG |
| 839 | Encoding | GGAATTTAGTGAGAAGGGTTTGGTATGCATACCAAA |
| | Probe 792 | CTTTAAAGTGGGTGTTGGAATTTAGTG |
| 840 | Encoding | GGAATTTAGTGAGAAGGGTACGTGAAACTATACCAT |
| | Probe 793 | CGGGATAGGGTGTTGGAATTTAGTG |
| 841 | Encoding | GGAATTTAGTGAGAAGGGTGTATGGTATGCATACCA |
| | Probe 794 | AACTAATGGGTGTTGGAATTTAGTG |
| 842 | Encoding | GGAATTTAGTGAGAAGGGCGCGAAACTATACCATCG |
| | Probe 795 | GGTAAATGGGTGTTGGAATTTAGTG |
| 843 | Encoding | GGAATTTAGTGAGAAGGGCATTACAAAATGGTATGC |
| | Probe 796 | ATACCTTTGGGTGTTGGAATTTAGTG |
| 844 | Encoding | GGATAGAGTATAGTTGGGACGTGAAACTATACCATC |
| | Probe 797 | GGGTTAAGGATGGAGGATAGAGTAT |
| 845 | Encoding | GGATAGAGTATAGTTGGGTAGGCGGTGAAACTATAC |
| | Probe 798 | CATGCCGGATGGAGGATAGAGTAT |
| 846 | Encoding | GGATAGAGTATAGTTGGGTGTAAAAATGGTATGCAT |
| | Probe 799 | ACCAAAGAAGGATGGAGGATAGAGTAT |
| 847 | Encoding | GGATAGAGTATAGTTGGGTTTGGTATGCATACCAAA |
| | Probe 800 | CTTTAAAGGGATGGAGGATAGAGTAT |
| 848 | Encoding | GGATAGAGTATAGTTGGGTACGTGAAACTATACCAT |
| | Probe 801 | CGGGATAGGATGGAGGATAGAGTAT |
| 849 | Encoding | GGATAGAGTATAGTTGGGTGTATGGTATGCATACCA |
| | Probe 802 | AACTAATGGATGGAGGATAGAGTAT |
| 850 | Encoding | GGATAGAGTATAGTTGGGCGCGAAACTATACCATCG |
| | Probe 803 | GGTAAATGGATGGAGGATAGAGTAT |
| 851 | Encoding | GGATAGAGTATAGTTGGGCATTACAAAATGGTATGC |
| | Probe 804 | ATACCTTTGGATGGAGGATAGAGTAT |
| 852 | Encoding | GGTAATTGAGTAGAAGGGAATGGGTATTAGTACCAA |
| | Probe 805 | TTTCTCTCAGGGATGAGGTAATTGAGT |
| 853 | Encoding | GGTAATTGAGTAGAAGGGCGTCCTTCGCAGGGTAGC |
| | Probe 806 | TGCGGAGGGATGAGGTAATTGAGT |
| 854 | Encoding | GGTAATTGAGTAGAAGGGCGGGAAGGGAAACGCTC |
| | Probe 807 | TTTCTTCGGGATGAGGTAATTGAGT |
| 855 | Encoding | GGTAATTGAGTAGAAGGGTGCGACCGCAACTATTCT |
| | Probe 808 | CTAGAGGTGGGATGAGGTAATTGAGT |
| 856 | Encoding | GGTAATTGAGTAGAAGGGTGGAACATTTCACCTCTA |
| | Probe 809 | ACTTATCATTGTGGGATGAGGTAATTGAGT |
| 857 | Encoding | GGTAATTGAGTAGAAGGGCGGTCCTTATTCGTACGA |
| | Probe 810 | TACTTAGTGGGATGAGGTAATTGAGT |
| 858 | Encoding | GGTAATTGAGTAGAAGGGTGTCCCCCTATGTATCGT |
| | Probe 811 | CGCCAACGGGATGAGGTAATTGAGT |
| 859 | Encoding | GGTAATTGAGTAGAAGGGAATGGGTATTAGTACCAA |
| | Probe 812 | TTTCTCACACGGGATGAGGTAATTGAGT |
| 860 | Encoding | AGTATTATTAGGGTGAGGAATGGGTATTAGTACCAA |
| | Probe 813 | TTTCTCTCAGGGTTGGAGTATTATTAG |
| 861 | Encoding | AGTATTATTAGGGTGAGGCGTCCTTCGCAGGGTAGC |
| | Probe 814 | TGCGGAGGGTTGGAGTATTATTAG |
| 862 | Encoding | AGTATTATTAGGGTGAGGCGGGAAGGGAAACGCTCT |
| | Probe 815 | TTCTTCGGGTTGGAGTATTATTAG |
| 863 | Encoding | AGTATTATTAGGGTGAGGGCGACCGCAACTATTCTC |
| | Probe 816 | TAGAGGTGGGTTGGAGTATTATTAG |
| 864 | Encoding | AGTATTATTAGGGTGAGGTGGAACATTTCACCTCTA |
| | Probe 817 | ACTTATCATTGTGGGTTGGAGTATTATTAG |
| 865 | Encoding | AGTATTATTAGGGTGAGGCGGTCCTTATTCGTACGA |
| | Probe 818 | TACTTAGTGGGTTGGAGTATTATTAG |
| 866 | Encoding | AGTATTATTAGGGTGAGGGTCCCCCTATGTATCGTC |
| | Probe 819 | GCCAACGGGTTGGAGTATTATTAG |
| 867 | Encoding | AGTATTATTAGGGTGAGGAATGGGTATTAGTACCAA |
| | Probe 820 | TTTCTCACACGGGTTGGAGTATTATTAG |
| 868 | Encoding | GGAATTTAGTGAGAAGGGAGGCACTCGAATGCCAC |
| | Probe 821 | ATGATTACTGGGTGTTGGAATTTAGTG |
| 869 | Encoding | GGAATTTAGTGAGAAGGGTGACCTCAAGTTACACAG |
| | Probe 822 | TTTCCTCTGGGTGTTGGAATTTAGTG |
| 870 | Encoding | GGAATTTAGTGAGAAGGGAGGCACTCGAATGCCAC |
| | Probe 823 | ATGATAACGGGTGTTGGAATTTAGTG |
| 871 | Encoding | GGAATTTAGTGAGAAGGGTGGACCGCCACTCGAATG |
| | Probe 824 | CCACAACTGGGTGTTGGAATTTAGTG |
| 872 | Encoding | GGAATTTAGTGAGAAGGGTGAGCTGCACTCAAGTTA |
| | Probe 825 | CACACAAGGGTGTTGGAATTTAGTG |
| 873 | Encoding | GGAATTTAGTGAGAAGGGAGGCACTCGAATGCCAC |
| | Probe 826 | ATGAAAAGGGTGTTGGAATTTAGTG |
| 874 | Encoding | GGAATTTAGTGAGAAGGGTGGACCGCCACTCGAATG |
| | Probe 827 | CCACTACGGGTGTTGGAATTTAGTG |
| 875 | Encoding | GGAATTTAGTGAGAAGGGTGGCCGCCACTCGAATGC |
| | Probe 828 | CACAACTGGGTGTTGGAATTTAGTG |
| 876 | Encoding | AATGATATGTTGAGTGGGAGGCACTCGAATGCCACA |
| | Probe 829 | TGATTACTGTGGTGGAATGATATGTT |
| 877 | Encoding | AATGATATGTTGAGTGGGTGACCTCAAGTTACACAG |
| | Probe 830 | TTTCCTCTGTGGTGGAATGATATGTT |
| 878 | Encoding | AATGATATGTTGAGTGGGAGGCACTCGAATGCCACA |
| | Probe 831 | TGATAACGTGGTGGAATGATATGTT |
| 879 | Encoding | AATGATATGTTGAGTGGGTGGACCGCCACTCGAATG |
| | Probe 832 | CCACAACTGTGGTGGAATGATATGTT |
| 880 | Encoding | AATGATATGTTGAGTGGGTGAGCTGCACTCAAGTTA |
| | Probe 833 | CACACAAGTGGTGGAATGATATGTT |
| 881 | Encoding | AATGATATGTTGAGTGGGAGGCACTCGAATGCCACA |
| | Probe 834 | TGAAAAGTGGTGGAATGATATGTT |
| 882 | Encoding | AATGATATGTTGAGTGGGTGGACCGCCACTCGAATG |
| | Probe 835 | CCACTACGTGGTGGAATGATATGTT |
| 883 | Encoding | AATGATATGTTGAGTGGGTGGCCGCCACTCGAATGC |
| | Probe 836 | CACAACTGTGGTGGAATGATATGTT |
| 884 | Encoding | ATAAGATAGTGAGATGGGAGAGACACTCTAGCAAA |
| | Probe 837 | ACAGTAAGGTGGGTGATAAGATAGTG |
| 885 | Encoding | ATAAGATAGTGAGATGGGTGGAGTTTTTCACACACT |
| | Probe 838 | GCCTACGTGGGTGATAAGATAGTG |
| 886 | Encoding | ATAAGATAGTGAGATGGGCCGCGTTACCGGCCCGCC |
| | Probe 839 | AGGGCCTGTGGGTGATAAGATAGTG |
| 887 | Encoding | ATAAGATAGTGAGATGGGTAGAAAACTTCATCTTAA |
| | Probe 840 | TCGCTAGCGTGGGTGATAAGATAGTG |
| 888 | Encoding | ATAAGATAGTGAGATGGGTGAGACACTCTAGCAAA |
| | Probe 841 | ACAGTAAGGTGGGTGATAAGATAGTG |
| 889 | Encoding | ATAAGATAGTGAGATGGGAGGAAACTTCATCTTAAT |
| | Probe 842 | CGCTTGCAGTGGGTGATAAGATAGTG |
| 890 | Encoding | ATAAGATAGTGAGATGGGCGGGTTACCGGCCCGCCA |
| | Probe 843 | GGGCCTGTGGGTGATAAGATAGTG |
| 891 | Encoding | ATAAGATAGTGAGATGGGTGCCTTTTTCACACACTG |
| | Probe 844 | CCATCGCGTGGGTGATAAGATAGTG |
| 892 | Encoding | AATGATATGTTGAGTGGGAGAGACACTCTAGCAAAA |
| | Probe 845 | CAGTAAGGTGGTGGAATGATATGTT |
| 893 | Encoding | AATGATATGTTGAGTGGGTGGAGTTTTTCACACACT |
| | Probe 846 | GCCTACGTGGTGGAATGATATGTT |
| 894 | Encoding | AATGATATGTTGAGTGGGCCGCGTTACCGGCCCGCC |
| | Probe 847 | AGGGCCTGTGGTGGAATGATATGTT |
| 895 | Encoding | AATGATATGTTGAGTGGGTAGAAAACTTCATCTTAA |
| | Probe 848 | TCGCTAGCGTGGTGGAATGATATGTT |
| 896 | Encoding | AATGATATGTTGAGTGGGTGAGACACTCTAGCAAAA |
| | Probe 849 | CAGTAAGGTGGTGGAATGATATGTT |
| 897 | Encoding | AATGATATGTTGAGTGGGAGGAAACTTCATCTTAAT |
| | Probe 850 | CGCTTGCAGTGGTGGAATGATATGTT |
| 898 | Encoding | AATGATATGTTGAGTGGGCGGGTTACCGGCCCGCCA |
| | Probe 851 | GGGCCTGTGGTGGAATGATATGTT |
| 899 | Encoding | AATGATATGTTGAGTGGGTGCCTTTTTCACACACTGC |
| | Probe 852 | CATCGCGTGGTGGAATGATATGTT |
| 900 | Encoding | GGTAATTGAGTAGAAGGGAGTCGGTACCTGCAAACA |
| | Probe 853 | TCCACAGCAGGGATGAGGTAATTGAGT |
| 901 | Encoding | GGTAATTGAGTAGAAGGGTGGACCCGAAAGATAGG |
| | Probe 854 | CCATGGACGGGATGAGGTAATTGAGT |
| 902 | Encoding | GGTAATTGAGTAGAAGGGCGAGCCGCCGACTGTATA |
| | Probe 855 | TCGGGCGGGATGAGGTAATTGAGT |
| 903 | Encoding | GGTAATTGAGTAGAAGGGTGACGATGACTTTAAGGA |
| | Probe 856 | TTGGACGCTGGGATGAGGTAATTGAGT |
| 904 | Encoding | GGTAATTGAGTAGAAGGGATCCCAATCACCGGTTTC |
| | Probe 857 | ACCGATGGGATGAGGTAATTGAGT |
| 905 | Encoding | GGTAATTGAGTAGAAGGGAACCCACAAAATTTCACG |
| | Probe 858 | GCAGCGTGGGATGAGGTAATTGAGT |
| 906 | Encoding | GGTAATTGAGTAGAAGGGAATGATAAATCTTTGCTC |
| | Probe 859 | CGACAGTCGGGATGAGGTAATTGAGT |
| 907 | Encoding | GGTAATTGAGTAGAAGGGTGGCTCTGGATCTTTCCT |
| | Probe 860 | CTGGTTGGGATGAGGTAATTGAGT |
| 908 | Encoding | AATGATATGTTGAGTGGGAGTCGGTACCTGCAAACA |
| | Probe 861 | TCCACAGCAGTGGTGGAATGATATGTT |
| 909 | Encoding | AATGATATGTTGAGTGGGTGGACCCGAAAGATAGGC |
| | Probe 862 | CATGGACGTGGTGGAATGATATGTT |
| 910 | Encoding | AATGATATGTTGAGTGGGCGAGCCGCCGACTGTATA |
| | Probe 863 | TCGGGCGTGGTGGAATGATATGTT |
| 911 | Encoding | AATGATATGTTGAGTGGGTGACGATGACTTTAAGGA |
| | Probe 864 | TTGGACGCTGTGGTGGAATGATATGTT |
| 912 | Encoding | AATGATATGTTGAGTGGGATCCCAATCACCGGTTTC |
| | Probe 865 | ACCGATGTGGTGGAATGATATGTT |
| 913 | Encoding | AATGATATGTTGAGTGGGAACCCACAAAATTTCACG |
| | Probe 866 | GCAGCGGTGGTGGAATGATATGTT |
| 914 | Encoding | AATGATATGTTGAGTGGGAATGATAAATCTTTGCTC |
| | Probe 867 | CGACAGTCGTGGTGGAATGATATGTT |
| 915 | Encoding | AATGATATGTTGAGTGGGTGGCTCTGGATCTTTCCTC |
| | Probe 868 | TGGTTGTGGTGGAATGATATGTT |
| 916 | Encoding | GTAATAGATATGAGGGTGAGTTGGTACATACAAAAT |
| | Probe 869 | GGTATACAATGTGGGAGGGTAATAGATAT |
| 917 | Encoding | GTAATAGATATGAGGGTGATGAATGGTATACATACC |
| | Probe 870 | AAACTTTAAAGTGGGAGGGTAATAGATAT |
| 918 | Encoding | GTAATAGATATGAGGGTGTGTATGGTATACATACCA |
| | Probe 871 | AACTTTATAGGTGGGAGGGTAATAGATAT |
| 919 | Encoding | GTAATAGATATGAGGGTGGTAGGTACATACAAAATG |
| | Probe 872 | GTATACAATGTGGGAGGGTAATAGATAT |
| 920 | Encoding | GTAATAGATATGAGGGTGAGTTGGTACATACAAAAT |
| | Probe 873 | GGTATACTATTGGGAGGGTAATAGATAT |
| 921 | Encoding | GTAATAGATATGAGGGTGGTTTGGTATACATACCAA |
| | Probe 874 | ACTTTATTAGGTGGGAGGGTAATAGATAT |
| 922 | Encoding | GTAATAGATATGAGGGTGCCAACATACCAAACTTTA |
| | Probe 875 | TTCCCATAATTTGGGAGGGTAATAGATAT |
| 923 | Encoding | TGTATAGGATTAGAAGGGAGTTGGTACATACAAAAT |
| | Probe 876 | GGTATACAATGTGGGTGAGTGTATAGGATT |
| 924 | Encoding | TGTATAGGATTAGAAGGGATGAATGGTATACATACC |
| | Probe 877 | AAACTTTAAAGTGGGTGAGTGTATAGGATT |
| 925 | Encoding | TGTATAGGATTAGAAGGGTGTATGGTATACATACCA |
| | Probe 878 | AACTTTATAGGTGGGTGAGTGTATAGGATT |
| 926 | Encoding | TGTATAGGATTAGAAGGGTGTAGGTACATACAAAAT |
| | Probe 879 | GGTATACAATGTGGGTGAGTGTATAGGATT |
| 927 | Encoding | TGTATAGGATTAGAAGGGAGTTGGTACATACAAAAT |
| | Probe 880 | GGTATACTATGGGTGAGTGTATAGGATT |
| 928 | Encoding | TGTATAGGATTAGAAGGGTGTTTGGTATACATACCA |
| | Probe 881 | AACTTTATTAGGTGGGTGAGTGTATAGGATT |
| 929 | Encoding | TGTATAGGATTAGAAGGGCCAACATACCAAACTTTA |
| | Probe 882 | TTCCCATAATTGGGTGAGTGTATAGGATT |
| 930 | Encoding | ATAAGATAGTGAGATGGGTGCGTCTCCACTATTGCT |
| | Probe 883 | AGCGCTTGTGGGTGATAAGATAGTG |
| 931 | Encoding | ATAAGATAGTGAGATGGGTGGACTCAACTGTACTCA |
| | Probe 884 | AGGACGCGTCGTGGGTGATAAGATAGTG |
| 932 | Encoding | ATAAGATAGTGAGATGGGCAGTTGCAGTTTAGTGAG |
| | Probe 885 | CTGGGAGTGGGTGATAAGATAGTG |
| 933 | Encoding | ATAAGATAGTGAGATGGGTGGAATCCATCGAAGACT |
| | Probe 886 | AGGTCCCGTGGGTGATAAGATAGTG |
| 934 | Encoding | ATAAGATAGTGAGATGGGTGGATTCATAAAGTACAT |
| | Probe 887 | ACAAAAAGGGTGGTGGGTGATAAGATAGTG |
| 935 | Encoding | ATAAGATAGTGAGATGGGAGCATCTCCACTATTGCT |
| | Probe 888 | AGCGCTTGTGGGTGATAAGATAGTG |
| 936 | Encoding | ATAAGATAGTGAGATGGGTGGCACAGCGGTGATTGC |
| | Probe 889 | TCAGACGTGGGTGATAAGATAGTG |
| 937 | Encoding | ATAAGATAGTGAGATGGGACCATTGGCATCCACTTG |
| | Probe 890 | CGTCCAGTGGGTGATAAGATAGTG |
| 938 | Encoding | TGTATAGGATTAGAAGGGTGCGTCTCCACTATTGCT |
| | Probe 891 | AGCGCTTGGGTGAGTGTATAGGATT |
| 939 | Encoding | TGTATAGGATTAGAAGGGTGGACTCAACTGTACTCA |
| | Probe 892 | AGGACGCGTCGGGTGAGTGTATAGGATT |
| 940 | Encoding | TGTATAGGATTAGAAGGGCAGTTGCAGTTTAGTGAG |
| | Probe 893 | CTGGGAGGGTGAGTGTATAGGATT |
| 941 | Encoding | TGTATAGGATTAGAAGGGTGGAATCCATCGAAGACT |
| | Probe 894 | AGGTCCCGGGTGAGTGTATAGGATT |
| 942 | Encoding | TGTATAGGATTAGAAGGGTGGATTCATAAAGTACAT |
| | Probe 895 | ACAAAAAGGGTGTGGGTGAGTGTATAGGATT |
| 943 | Encoding | TGTATAGGATTAGAAGGGAGCATCTCCACTATTGCT |
| | Probe 896 | AGCGCTTGGGTGAGTGTATAGGATT |
| 944 | Encoding | TGTATAGGATTAGAAGGGTGGCACAGCGGTGATTGC |
| | Probe 897 | TCAGACGGGTGAGTGTATAGGATT |
| 945 | Encoding | TGTATAGGATTAGAAGGGACCATTGGCATCCACTTG |
| | Probe 898 | CGTCCAGGGTGAGTGTATAGGATT |
| 946 | Encoding | TTAATATGGGTAGTTGGGTGTGTCACTTGGACGAAT |
| | Probe 899 | CCTCGTAGTGGGTGTGTTAATATGGGT |
| 947 | Encoding | TTAATATGGGTAGTTGGGACGCCCAGCTGTATCATG |
| | Probe 900 | CGGTTAAGGGTGTGTTAATATGGGT |
| 948 | Encoding | TTAATATGGGTAGTTGGGCGCTTTGCCTCTCTTTGTT |
| | Probe 901 | GGAGCGGGTGTGTTAATATGGGT |
| 949 | Encoding | TTAATATGGGTAGTTGGGACGCCCAGCTGTATCATG |
| | Probe 902 | CGGTAAATGGGTGTGTTAATATGGGT |
| 950 | Encoding | TTAATATGGGTAGTTGGGAGTTGGACGAATCCTCGA |
| | Probe 903 | TCCTTAGGGTGTGTTAATATGGGT |
| 951 | Encoding | TTAATATGGGTAGTTGGGTGGACTTCACTTGGACGA |
| | Probe 904 | ATCCTGCTGGGTGTGTTAATATGGGT |
| 952 | Encoding | TTAATATGGGTAGTTGGGACGCCCAGCTGTATCATG |
| | Probe 905 | CGGATAGGGTGTGTTAATATGGGT |
| 953 | Encoding | TTAATATGGGTAGTTGGGTGCACTTTGCCTCTCTTTG |
| | Probe 906 | TTGGAGCGGGTGTGTTAATATGGGT |
| 954 | Encoding | TGTATAGGATTAGAAGGGTGTGTCACTTGGACGAAT |
| | Probe 907 | CCTCGTAGTGGGTGAGTGTATAGGATT |
| 955 | Encoding | TGTATAGGATTAGAAGGGACGCCCAGCTGTATCATG |
| | Probe 908 | CGGTTAAGGGTGAGTGTATAGGATT |
| 956 | Encoding | TGTATAGGATTAGAAGGGCGCTTTGCCTCTCTTTGTT |
| | Probe 909 | GGAGCGGGTGAGTGTATAGGATT |
| 957 | Encoding | TGTATAGGATTAGAAGGGACGCCCAGCTGTATCATG |
| | Probe 910 | CGGTAAATGGGTGAGTGTATAGGATT |
| 958 | Encoding | TGTATAGGATTAGAAGGGAGTTGGACGAATCCTCGA |
| | Probe 911 | TCCTTAGGGTGAGTGTATAGGATT |
| 959 | Encoding | TGTATAGGATTAGAAGGGTGGACTTCACTTGGACGA |
| | Probe 912 | ATCCTGCTGGGTGAGTGTATAGGATT |
| 960 | Encoding | TGTATAGGATTAGAAGGGACGCCCAGCTGTATCATG |
| | Probe 913 | CGGATAGGGTGAGTGTATAGGATT |
| 961 | Encoding | TGTATAGGATTAGAAGGGTGCACTTTGCCTCTCTTTG |
| | Probe 914 | TTGGAGCGGGTGAGTGTATAGGATT |
| 962 | Encoding | GGTAATTGAGTAGAAGGGTCGTGACTTTCTAAGTAA |
| | Probe 915 | TTACCGAGTGGGATGAGGTAATTGAGT |
| 963 | Encoding | GGTAATTGAGTAGAAGGGTGTTTCTGATGCAATTCT |
| | Probe 916 | CCGGAACGGGATGAGGTAATTGAGT |
| 964 | Encoding | GGTAATTGAGTAGAAGGGCTTGCTTTAAGAGATCCG |
| | Probe 917 | CTTCGGTGGGATGAGGTAATTGAGT |
| 965 | Encoding | GGTAATTGAGTAGAAGGGTCTTGCGTCTAGTGTTGT |
| | Probe 918 | TATCGCCGGGATGAGGTAATTGAGT |
| 966 | Encoding | GGTAATTGAGTAGAAGGGCTTATCTTTCAAACTCTA |
| | Probe 919 | GACATGGCAGGGATGAGGTAATTGAGT |
| 967 | Encoding | GGTAATTGAGTAGAAGGGTCTGCTGACTCCTATAAA |
| | Probe 920 | GGTTTAGTGGGATGAGGTAATTGAGT |
| 968 | Encoding | GGTAATTGAGTAGAAGGGTGGATCTCTTAGGTTTGC |
| | Probe 921 | ACTGCTAGGGATGAGGTAATTGAGT |
| 969 | Encoding | GGTAATTGAGTAGAAGGGTCCGAAACCTCCCAACAC |
| | Probe 922 | TTACGTGGGATGAGGTAATTGAGT |
| 970 | Encoding | TGTATAGGATTAGAAGGGTCGTGACTTTCTAAGTAA |
| | Probe 923 | TTACCGAGTGGGTGAGTGTATAGGATT |
| 971 | Encoding | TGTATAGGATTAGAAGGGTGTTTCTGATGCAATTCTC |
| | Probe 924 | CGGAACGGGTGAGTGTATAGGATT |
| 972 | Encoding | TGTATAGGATTAGAAGGGCTTGCTTTAAGAGATCCG |
| | Probe 925 | CTTCGGTGGGTGAGTGTATAGGATT |
| 973 | Encoding | TGTATAGGATTAGAAGGGTCTTGCGTCTAGTGTTGTT |
| | Probe 926 | ATCGCCGGGTGAGTGTATAGGATT |
| 974 | Encoding | TGTATAGGATTAGAAGGGCTTATCTTTCAAACTCTA |
| | Probe 927 | GACATGGCAGGGTGAGTGTATAGGATT |
| 975 | Encoding | TGTATAGGATTAGAAGGGTCTGCTGACTCCTATAAA |
| | Probe 928 | GGTTTAGTGGGTGAGTGTATAGGATT |
| 976 | Encoding | TGTATAGGATTAGAAGGGTGGATCTCTTAGGTTTGC |
| | Probe 929 | ACTGCTAGGGTGAGTGTATAGGATT |
| 977 | Encoding | TGTATAGGATTAGAAGGGTCCGAAACCTCCCAACAC |
| | Probe 930 | TTACGTGGGTGAGTGTATAGGATT |
| 978 | Encoding | GTAATAGATATGAGGGTGGCCACCCTTGGGTCCCCG |
| | Probe 931 | ACACCATCTGGGAGGGTAATAGATAT |
| 979 | Encoding | GTAATAGATATGAGGGTGCTCCCTTGGGTCCCCGAC |
| | Probe 932 | ACCATCTGGGAGGGTAATAGATAT |
| 980 | Encoding | GTAATAGATATGAGGGTGCCTCCCTTGGGTCCCCGA |
| | Probe 933 | CACGATTGGGAGGGTAATAGATAT |
| 981 | Encoding | GTAATAGATATGAGGGTGCCTCCCTTGGGTCCCCGA |
| | Probe 934 | CACCATCTGGGAGGGTAATAGATAT |
| 982 | Encoding | GTAATAGATATGAGGGTGGCCACCCTTGGGTCCCCG |
| | Probe 935 | ACACGATTGGGAGGGTAATAGATAT |
| 983 | Encoding | GTAATAGATATGAGGGTGAAAGGGTTTGCTTACCGT |
| | Probe 936 | CACGCCTGGGAGGGTAATAGATAT |
| 984 | Encoding | GTAATAGATATGAGGGTGGCCACCCTTGGGTCCCCG |
| | Probe 937 | ACAGGATGGGAGGGTAATAGATAT |
| 985 | Encoding | ATGGAAGTAGTAGAAGGGTGCCACCCTTGGGTCCCC |
| | Probe 938 | GACACCATCGGGATGTATGGAAGTAGT |
| 986 | Encoding | ATGGAAGTAGTAGAAGGGCTCCCTTGGGTCCCCGAC |
| | Probe 939 | ACCATCGGGATGTATGGAAGTAGT |
| 987 | Encoding | ATGGAAGTAGTAGAAGGGCCTCCCTTGGGTCCCCGA |
| | Probe 940 | CACGATGGGATGTATGGAAGTAGT |
| 988 | Encoding | ATGGAAGTAGTAGAAGGGCCTCCCTTGGGTCCCCGA |
| | Probe 941 | CACCATCGGGATGTATGGAAGTAGT |
| 989 | Encoding | ATGGAAGTAGTAGAAGGGTGCCACCCTTGGGTCCCC |
| | Probe 942 | GACACGATGGGATGTATGGAAGTAGT |
| 990 | Encoding | ATGGAAGTAGTAGAAGGGAAAGGGTTTGCTTACCGT |
| | Probe 943 | CACGCCGGGATGTATGGAAGTAGT |
| 991 | Encoding | ATGGAAGTAGTAGAAGGGTGCCACCCTTGGGTCCCC |
| | Probe 944 | GACAGGAGGGATGTATGGAAGTAGT |
| 992 | Encoding | GGAATTTAGTGAGAAGGGAGTTCAGACCTAAGCAAC |
| | Probe 945 | CGCGACGGGTGTTGGAATTTAGTG |
| 993 | Encoding | GGAATTTAGTGAGAAGGGATCGTGACTTTCTGGTTG |
| | Probe 946 | GATACGCAGGGTGTTGGAATTTAGTG |
| 994 | Encoding | GGAATTTAGTGAGAAGGGTCGCAGTTGCAGACCAGA |
| | Probe 947 | CAGGGCGGGTGTTGGAATTTAGTG |
| 995 | Encoding | GGAATTTAGTGAGAAGGGTGGACATAAAGGTTAGG |
| | Probe 948 | CCACCCTGTGGGTGTTGGAATTTAGTG |
| 996 | Encoding | GGAATTTAGTGAGAAGGGCTTGAACGCCTTATCTCT |
| | Probe 949 | AAGGAATGGGTGTTGGAATTTAGTG |
| 997 | Encoding | GGAATTTAGTGAGAAGGGTCAGGCCAGTGCGTACGA |
| | Probe 950 | CTTCGTGGGTGTTGGAATTTAGTG |
| 998 | Encoding | GGAATTTAGTGAGAAGGGTTATGGCAACTAGTAACA |
| | Probe 951 | AGGCAAGGGTGTTGGAATTTAGTG |
| 999 | Encoding | GGAATTTAGTGAGAAGGGTTCATCTTTCAAACAAAA |
| | Probe 952 | GCCATGACCGGGTGTTGGAATTTAGTG |
| 1000 | Encoding | ATGGAAGTAGTAGAAGGGAGTTCAGACCTAAGCAA |
| | Probe 953 | CCGCGACGGGATGTATGGAAGTAGT |
| 1001 | Encoding | ATGGAAGTAGTAGAAGGGATCGTGACTTTCTGGTTG |
| | Probe 954 | GATACGCAGGGATGTATGGAAGTAGT |
| 1002 | Encoding | ATGGAAGTAGTAGAAGGGTCGCAGTTGCAGACCAG |
| | Probe 955 | ACAGGGCGGGATGTATGGAAGTAGT |
| 1003 | Encoding | ATGGAAGTAGTAGAAGGGTGGACATAAAGGTTAGG |
| | Probe 956 | CCACCCTGTGGGATGTATGGAAGTAGT |
| 1004 | Encoding | ATGGAAGTAGTAGAAGGGCTTGAACGCCTTATCTCT |
| | Probe 957 | AAGGAATGGGATGTATGGAAGTAGT |
| 1005 | Encoding | ATGGAAGTAGTAGAAGGGTCAGGCCAGTGCGTACG |
| | Probe 958 | ACTTCGTGGGATGTATGGAAGTAGT |
| 1006 | Encoding | ATGGAAGTAGTAGAAGGGTTATGGCAACTAGTAACA |
| | Probe 959 | AGGCAAGGGATGTATGGAAGTAGT |
| 1007 | Encoding | ATGGAAGTAGTAGAAGGGTTCATCTTTCAAACAAAA |
| | Probe 960 | GCCATGACCGGGATGTATGGAAGTAGT |
| 1008 | Encoding | TTAATATGGGTAGTTGGGTAATTCCTTTCCCAGCAAG |
| | Probe 961 | CTCCAGGGTGTGTTAATATGGGT |
| 1009 | Encoding | TTAATATGGGTAGTTGGGTGAACCAGCAAGCTGGTC |
| | Probe 962 | CATTGTAGGGTGTGTTAATATGGGT |
| 1010 | Encoding | TTAATATGGGTAGTTGGGTGTTCTTGGTAAGGTTCTC |
| | Probe 963 | CGCCAAGGGTGTGTTAATATGGGT |
| 1011 | Encoding | TTAATATGGGTAGTTGGGTGCCCCATCCCATAGCGA |
| | Probe 964 | TAAAAGAGGGTGTGTTAATATGGGT |
| 1012 | Encoding | TTAATATGGGTAGTTGGGAAGATCTGACTTGCCCTG |
| | Probe 965 | CCAGGAGGGTGTGTTAATATGGGT |
| 1013 | Encoding | TTAATATGGGTAGTTGGGTGCTGGACTCCCCGGCTA |
| | Probe 966 | AGGGCGGTGGGTGTGTTAATATGGGT |
| 1014 | Encoding | TTAATATGGGTAGTTGGGTGGAGGATTATCTCCGGC |
| | Probe 967 | AGTCAGGTGGGTGTGTTAATATGGGT |
| 1015 | Encoding | TTAATATGGGTAGTTGGGTAGAACTGGGACGGTTTT |
| | Probe 968 | TTTCACGGGTGTGTTAATATGGGT |
| 1016 | Encoding | ATGGAAGTAGTAGAAGGGTAATTCCTTTCCCAGCAA |
| | Probe 969 | GCTCCAGGGATGTATGGAAGTAGT |
| 1017 | Encoding | ATGGAAGTAGTAGAAGGGTGAACCAGCAAGCTGGT |
| | Probe 970 | CCATTGTAGGGATGTATGGAAGTAGT |
| 1018 | Encoding | ATGGAAGTAGTAGAAGGGTGTTCTTGGTAAGGTTCT |
| | Probe 971 | CCGCCAAGGGATGTATGGAAGTAGT |
| 1019 | Encoding | ATGGAAGTAGTAGAAGGGTGCCCCATCCCATAGCGA |
| | Probe 972 | TAAAAGAGGGATGTATGGAAGTAGT |
| 1020 | Encoding | ATGGAAGTAGTAGAAGGGAAGATCTGACTTGCCCTG |
| | Probe 973 | CCAGGAGGGATGTATGGAAGTAGT |
| 1021 | Encoding | ATGGAAGTAGTAGAAGGGTGCTGGACTCCCCGGCTA |
| | Probe 974 | AGGGCGGTGGGATGTATGGAAGTAGT |
| 1022 | Encoding | ATGGAAGTAGTAGAAGGGTGGAGGATTATCTCCGGC |
| | Probe 975 | AGTCAGGTGGGATGTATGGAAGTAGT |
| 1023 | Encoding | ATGGAAGTAGTAGAAGGGTAGAACTGGGACGGTTTT |
| | Probe 976 | TTTCACGGGATGTATGGAAGTAGT |
| 1024 | Encoding | GGTAATTGAGTAGAAGGGAAACATCAGACTTAAAA |
| | Probe 977 | GACCGGGAGGGATGAGGTAATTGAGT |
| 1025 | Encoding | GGTAATTGAGTAGAAGGGTGACTCCAAAAGGTTACC |
| | Probe 978 | CCACGCCGGGATGAGGTAATTGAGT |
| 1026 | Encoding | GGTAATTGAGTAGAAGGGCCGTAAGAGATTTGCTAA |
| | Probe 979 | ACCTCGGCCGGGATGAGGTAATTGAGT |
| 1027 | Encoding | GGTAATTGAGTAGAAGGGTGTTACTCGGTGATAAAG |
| | Probe 980 | AAGTTAGCGGGATGAGGTAATTGAGT |
| 1028 | Encoding | GGTAATTGAGTAGAAGGGTGGACTCTAGGATTGTCA |
| | Probe 981 | AAAGATGTGTTGGGATGAGGTAATTGAGT |
| 1029 | Encoding | GGTAATTGAGTAGAAGGGTTGTCCAACACTTAGCAT |
| | Probe 982 | TCAAGCGGGATGAGGTAATTGAGT |
| 1030 | Encoding | GGTAATTGAGTAGAAGGGCGCCCCATCCAAAAGCG |
| | Probe 983 | GTAGGTAGGGATGAGGTAATTGAGT |
| 1031 | Encoding | GGTAATTGAGTAGAAGGGACCAGATACCGTCGAAA |
| | Probe 984 | CGTGAACAGAATGGGATGAGGTAATTGAGT |
| 1032 | Encoding | ATGGAAGTAGTAGAAGGGAAACATCAGACTTAAAA |
| | Probe 985 | GACCGGGAGGGATGTATGGAAGTAGT |
| 1033 | Encoding | ATGGAAGTAGTAGAAGGGTGACTCCAAAAGGTTACC |
| | Probe 986 | CCACGCCGGGATGTATGGAAGTAGT |
| 1034 | Encoding | ATGGAAGTAGTAGAAGGGCCGTAAGAGATTTGCTAA |
| | Probe 987 | ACCTCGGCCGGGATGTATGGAAGTAGT |
| 1035 | Encoding | ATGGAAGTAGTAGAAGGGTGTTACTCGGTGATAAAG |
| | Probe 988 | AAGTTAGCGGGATGTATGGAAGTAGT |
| 1036 | Encoding | ATGGAAGTAGTAGAAGGGTGGACTCTAGGATTGTCA |
| | Probe 989 | AAAGATGTGTTGGGATGTATGGAAGTAGT |
| 1037 | Encoding | ATGGAAGTAGTAGAAGGGTTGTCCAACACTTAGCAT |
| | Probe 990 | TCAAGCGGGATGTATGGAAGTAGT |
| 1038 | Encoding | ATGGAAGTAGTAGAAGGGCGCCCCATCCAAAAGCG |
| | Probe 991 | GTAGGTAGGGATGTATGGAAGTAGT |
| 1039 | Encoding | ATGGAAGTAGTAGAAGGGACCAGATACCGTCGAAA |
| | Probe 992 | CGTGAACAGAATGGGATGTATGGAAGTAGT |
| 1040 | Encoding | GTAATAGATATGAGGGTGGTGGTCTATATGTCCCGA |
| | Probe 993 | AGGTTCTGGGAGGGTAATAGATAT |
| 1041 | Encoding | GTAATAGATATGAGGGTGGATTTAATATTGGCAACC |
| | Probe 994 | GGAGTATGGGAGGGTAATAGATAT |
| 1042 | Encoding | GTAATAGATATGAGGGTGGCTTACCGTCATTCTTCAT |
| | Probe 995 | CCGAGTGGGAGGGTAATAGATAT |
| 1043 | Encoding | GTAATAGATATGAGGGTGGATTGTTATCCCGATGAC |
| | Probe 996 | AGACCGTGGGAGGGTAATAGATAT |
| 1044 | Encoding | GTAATAGATATGAGGGTGGACCAGTAACCTTTTTAC |
| | Probe 997 | CCCATACTGGGAGGGTAATAGATAT |
| 1045 | Encoding | GTAATAGATATGAGGGTGCAATACCCCCTTCGTCTA |
| | Probe 998 | GTAAGGTGGGAGGGTAATAGATAT |
| 1046 | Encoding | GTAATAGATATGAGGGTGGGTCATCGGTTTTACCTT |
| | Probe 999 | CGGGCCTGGGAGGGTAATAGATAT |
| 1047 | Encoding | GTAATAGATATGAGGGTGCGACCAGTTTTATGTGCA |
| | Probe 1000 | ATTCCCGCTGGGAGGGTAATAGATAT |
| 1048 | Encoding | GGATAGAGTATAGTTGGGTGTGGTCTATATGTCCCG |
| | Probe 1001 | AAGGTTCGGATGGAGGATAGAGTAT |
| 1049 | Encoding | GGATAGAGTATAGTTGGGTGATTTAATATTGGCAAC |
| | Probe 1002 | CGGAGTAGGATGGAGGATAGAGTAT |
| 1050 | Encoding | GGATAGAGTATAGTTGGGTGCTTACCGTCATTCTTCA |
| | Probe 1003 | TCCGAGGGATGGAGGATAGAGTAT |
| 1051 | Encoding | GGATAGAGTATAGTTGGGTGATTGTTATCCCGATGA |
| | Probe 1004 | CAGACCGGGATGGAGGATAGAGTAT |
| 1052 | Encoding | GGATAGAGTATAGTTGGGTGACCAGTAACCTTTTTA |
| | Probe 1005 | CCCCATACGGATGGAGGATAGAGTAT |
| 1053 | Encoding | GGATAGAGTATAGTTGGGCAATACCCCCTTCGTCTA |
| | Probe 1006 | GTAAGGTGGATGGAGGATAGAGTAT |
| 1054 | Encoding | GGATAGAGTATAGTTGGGTGGTCATCGGTTTTACCTT |
| | Probe 1007 | CGGGCCGGATGGAGGATAGAGTAT |
| 1055 | Encoding | GGATAGAGTATAGTTGGGCGACCAGTTTTATGTGCA |
| | Probe 1008 | ATTCCCGCGGATGGAGGATAGAGTAT |
| 1056 | Encoding | ATAAGATAGTGAGATGGGAGTCGCGACCCTTCCTCC |
| | Probe 1009 | CGATCCGTGGGTGATAAGATAGTG |
| 1057 | Encoding | ATAAGATAGTGAGATGGGTGACAGAAGTTTACGTAC |
| | Probe 1010 | CGAAAATGGTGGGTGATAAGATAGTG |
| 1058 | Encoding | ATAAGATAGTGAGATGGGTGTAGGCCAAGAGGAAT |
| | Probe 1011 | CATGCCCAGTGGGTGATAAGATAGTG |
| 1059 | Encoding | ATAAGATAGTGAGATGGGTGGTCGGCCAAGAGGAA |
| | Probe 1012 | TCATGCCCAGTGGGTGATAAGATAGTG |
| 1060 | Encoding | ATAAGATAGTGAGATGGGTGAGTCGCGACCCTTCCT |
| | Probe 1013 | CCCGTTCGTGGGTGATAAGATAGTG |
| 1061 | Encoding | ATAAGATAGTGAGATGGGACGATAGAAGTTTACGTA |
| | Probe 1014 | CCGAATATGTGGGTGATAAGATAGTG |
| 1062 | Encoding | ATAAGATAGTGAGATGGGAGCTGCCGGGCAGATGTC |
| | Probe 1015 | AAGCTGGTGGGTGATAAGATAGTG |
| 1063 | Encoding | ATAAGATAGTGAGATGGGTGAGCTGCCGGGCAGAT |
| | Probe 1016 | GTCAACCTGTGGGTGATAAGATAGTG |
| 1064 | Encoding | GGATAGAGTATAGTTGGGAGTCGCGACCCTTCCTCC |
| | Probe 1017 | CGATCCGGATGGAGGATAGAGTAT |
| 1065 | Encoding | GGATAGAGTATAGTTGGGTGACAGAAGTTTACGTAC |
| | Probe 1018 | CGAAAATGGGATGGAGGATAGAGTAT |
| 1066 | Encoding | GGATAGAGTATAGTTGGGTGTAGGCCAAGAGGAATC |
| | Probe 1019 | ATGCCCAGGATGGAGGATAGAGTAT |
| 1067 | Encoding | GGATAGAGTATAGTTGGGTGGTCGGCCAAGAGGAAT |
| | Probe 1020 | CATGCCCAGGATGGAGGATAGAGTAT |
| 1068 | Encoding | GGATAGAGTATAGTTGGGTGAGTCGCGACCCTTCCT |
| | Probe 1021 | CCCGTTCGGATGGAGGATAGAGTAT |
| 1069 | Encoding | GGATAGAGTATAGTTGGGACGATAGAAGTTTACGTA |
| | Probe 1022 | CCGAATATGGATGGAGGATAGAGTAT |
| 1070 | Encoding | GGATAGAGTATAGTTGGGAGCTGCCGGGCAGATGTC |
| | Probe 1023 | AAGCTGGGATGGAGGATAGAGTAT |
| 1071 | Encoding | GGATAGAGTATAGTTGGGTGAGCTGCCGGGCAGATG |
| | Probe 1024 | TCAACCTGGATGGAGGATAGAGTAT |
| 1072 | Encoding | GGTAATTGAGTAGAAGGGCGTGGAGGGTCCATACCC |
| | Probe 1025 | TCCCTGTGGGATGAGGTAATTGAGT |
| 1073 | Encoding | GGTAATTGAGTAGAAGGGCCGCGGAGGGTCCATACC |
| | Probe 1026 | CTCCGTGTGGGATGAGGTAATTGAGT |
| 1074 | Encoding | GGTAATTGAGTAGAAGGGTGCCCCGGAGGGTCCATA |
| | Probe 1027 | CCCTCGCTGGGATGAGGTAATTGAGT |
| 1075 | Encoding | GGTAATTGAGTAGAAGGGTGCCCCGGAGGGTCCATA |
| | Probe 1028 | CCCTCCCTGTGGGATGAGGTAATTGAGT |
| 1076 | Encoding | GGTAATTGAGTAGAAGGGCCGCGGAGGGTCCATACC |
| | Probe 1029 | CTCGCTGGGATGAGGTAATTGAGT |
| 1077 | Encoding | GGTAATTGAGTAGAAGGGCGTGGAGGGTCCATACCC |
| | Probe 1030 | TCCGTGTGGGATGAGGTAATTGAGT |
| 1078 | Encoding | GGTAATTGAGTAGAAGGGTGTGGAGGGTCCATACCC |
| | Probe 1031 | TCCGTGTGGGATGAGGTAATTGAGT |
| 1079 | Encoding | GGTAATTGAGTAGAAGGGCCGCGGAGGGTCCATACC |
| | Probe 1032 | CTCCGTGTGGGATGAGGTAATTGAGT |
| 1080 | Encoding | GGATAGAGTATAGTTGGGCGTGGAGGGTCCATACCC |
| | Probe 1033 | TCCCTGGGATGGAGGATAGAGTAT |
| 1081 | Encoding | GGATAGAGTATAGTTGGGCCGCGGAGGGTCCATACC |
| | Probe 1034 | CTCCGTGTGGATGGAGGATAGAGTAT |
| 1082 | Encoding | GGATAGAGTATAGTTGGGTGCCCCGGAGGGTCCATA |
| | Probe 1035 | CCCTCGCTGGATGGAGGATAGAGTAT |
| 1083 | Encoding | GGATAGAGTATAGTTGGGTGCCCCGGAGGGTCCATA |
| | Probe 1036 | CCCTCCCTGGGATGGAGGATAGAGTAT |
| 1084 | Encoding | GGATAGAGTATAGTTGGGCCGCGGAGGGTCCATACC |
| | Probe 1037 | CTCGCTGGATGGAGGATAGAGTAT |
| 1085 | Encoding | GGATAGAGTATAGTTGGGCGTGGAGGGTCCATACCC |
| | Probe 1038 | TCCGTGTGGATGGAGGATAGAGTAT |
| 1086 | Encoding | GGATAGAGTATAGTTGGGTGTGGAGGGTCCATACCC |
| | Probe 1039 | TCCGTGTGGATGGAGGATAGAGTAT |
| 1087 | Encoding | GGATAGAGTATAGTTGGGCCGCGGAGGGTCCATACC |
| | Probe 1040 | CTCCCTGGGATGGAGGATAGAGTAT |
| 1088 | Encoding | GTAATAGATATGAGGGTGGAGCGGCACTCTAGAAA |
| | Probe 1041 | AACAGAAATGGGAGGGTAATAGATAT |
| 1089 | Encoding | GTAATAGATATGAGGGTGAATTTTGGGATTTGCTAG |
| | Probe 1042 | GCAAGCTGGGAGGGTAATAGATAT |
| 1090 | Encoding | GTAATAGATATGAGGGTGGAGCGGCACTCTAGAAA |
| | Probe 1043 | AACACAATGGGAGGGTAATAGATAT |
| 1091 | Encoding | GTAATAGATATGAGGGTGAGTCCGAAGAGATCATCT |
| | Probe 1044 | TAAATGGAATGGGAGGGTAATAGATAT |
| 1092 | Encoding | GTAATAGATATGAGGGTGCAATTTTGGGATTTGCTA |
| | Probe 1045 | GGCTAGTGGGAGGGTAATAGATAT |
| 1093 | Encoding | GTAATAGATATGAGGGTGGAGCGGCACTCTAGAAA |
| | Probe 1046 | AACAGTAAGTGGGAGGGTAATAGATAT |
| 1094 | Encoding | GTAATAGATATGAGGGTGGCGAGTCATATAAGACTC |
| | Probe 1047 | AATCCGTTCTGGGAGGGTAATAGATAT |
| 1095 | Encoding | GTAATAGATATGAGGGTGCGAGTCATATAAGACTCA |
| | Probe 1048 | ATCCGTTCTGGGAGGGTAATAGATAT |
| 1096 | Encoding | TGTAATAGTAAGGAGGGAGAGCGGCACTCTAGAAA |
| | Probe 1049 | AACAGAAAGGGTGAGTGTAATAGTAA |
| 1097 | Encoding | TGTAATAGTAAGGAGGGAAATTTTGGGATTTGCTAG |
| | Probe 1050 | GCAAGCGGGTGAGTGTAATAGTAA |
| 1098 | Encoding | TGTAATAGTAAGGAGGGAGAGCGGCACTCTAGAAA |
| | Probe 1051 | AACACAAGGGTGAGTGTAATAGTAA |
| 1099 | Encoding | TGTAATAGTAAGGAGGGAAGTCCGAAGAGATCATCT |
| | Probe 1052 | TAAATGGAAGGGTGAGTGTAATAGTAA |
| 1100 | Encoding | TGTAATAGTAAGGAGGGACAATTTTGGGATTTGCTA |
| | Probe 1053 | GGCTAGTGGGTGAGTGTAATAGTAA |
| 1101 | Encoding | TGTAATAGTAAGGAGGGAGAGCGGCACTCTAGAAA |
| | Probe 1054 | AACAGTAAGTGGGTGAGTGTAATAGTAA |
| 1102 | Encoding | TGTAATAGTAAGGAGGGAGCGAGTCATATAAGACTC |
| | Probe 1055 | AATCCGTTCGGGTGAGTGTAATAGTAA |
| 1103 | Encoding | TGTAATAGTAAGGAGGGACGAGTCATATAAGACTCA |
| | Probe 1056 | ATCCGTTCGGGTGAGTGTAATAGTAA |
| 1104 | Encoding | GGAATTTAGTGAGAAGGGTGTCGCGGGCTCATCTTA |
| | Probe 1057 | TACTTGGTGGGTGTTGGAATTTAGTG |
| 1105 | Encoding | GGAATTTAGTGAGAAGGGTTTTCCTCAAAATCGCTT |
| | Probe 1058 | CGCAGCGGGTGTTGGAATTTAGTG |
| 1106 | Encoding | GGAATTTAGTGAGAAGGGATTCCCTGCCTTTCACTTC |
| | Probe 1059 | AGTGAGGGTGTTGGAATTTAGTG |
| 1107 | Encoding | GGAATTTAGTGAGAAGGGAACCCAGATTACTCCTTT |
| | Probe 1060 | GCCAGGTGGGTGTTGGAATTTAGTG |
| 1108 | Encoding | GGAATTTAGTGAGAAGGGCCAGGGAGATGTCAAGA |
| | Probe 1061 | CTTGCATGGGTGTTGGAATTTAGTG |
| 1109 | Encoding | GGAATTTAGTGAGAAGGGCGTTTCCAAAGCAGTTCA |
| | Probe 1062 | GGGCAAGGGTGTTGGAATTTAGTG |
| 1110 | Encoding | GGAATTTAGTGAGAAGGGTTTTTCCTCAAAATCGCT |
| | Probe 1063 | TCGGAGTGGGTGTTGGAATTTAGTG |
| 1111 | Encoding | GGAATTTAGTGAGAAGGGAGTCGCGGGCTCATCTTA |
| | Probe 1064 | TACTTGGTGGGTGTTGGAATTTAGTG |
| 1112 | Encoding | TGTAATAGTAAGGAGGGAGTCGCGGGCTCATCTTAT |
| | Probe 1065 | ACTTGGTGGGTGAGTGTAATAGTAA |
| 1113 | Encoding | TGTAATAGTAAGGAGGGATTTTCCTCAAAATCGCTT |
| | Probe 1066 | CGCAGCGGGTGAGTGTAATAGTAA |
| 1114 | Encoding | TGTAATAGTAAGGAGGGAATTCCCTGCCTTTCACTTC |
| | Probe 1067 | AGTGAGGGTGAGTGTAATAGTAA |
| 1115 | Encoding | TGTAATAGTAAGGAGGGAAACCCAGATTACTCCTTT |
| | Probe 1068 | GCCAGGTGGGTGAGTGTAATAGTAA |
| 1116 | Encoding | TGTAATAGTAAGGAGGGACCAGGGAGATGTCAAGA |
| | Probe 1069 | CTTGCATGGGTGAGTGTAATAGTAA |
| 1117 | Encoding | TGTAATAGTAAGGAGGGACGTTTCCAAAGCAGTTCA |
| | Probe 1070 | GGGCAAGGGTGAGTGTAATAGTAA |
| 1118 | Encoding | TGTAATAGTAAGGAGGGATTTTTCCTCAAAATCGCT |
| | Probe 1071 | TCGGAGTGGGTGAGTGTAATAGTAA |
| 1119 | Encoding | TGTAATAGTAAGGAGGGAAGTCGCGGGCTCATCTTA |
| | Probe 1072 | TACTTGGTGGGTGAGTGTAATAGTAA |
| 1120 | Encoding | ATAAGATAGTGAGATGGGTGTAGAAAACTTCCGTAC |
| | Probe 1073 | TAAGACAGGGTGGGTGATAAGATAGTG |
| 1121 | Encoding | ATAAGATAGTGAGATGGGTAAATGGAAATATCATGC |
| | Probe 1074 | GGTTAGGTGGGTGATAAGATAGTG |
| 1122 | Encoding | ATAAGATAGTGAGATGGGAACGGAAATATCATGCG |
| | Probe 1075 | GTATCAGGGTGGGTGATAAGATAGTG |
| 1123 | Encoding | ATAAGATAGTGAGATGGGTTGCCGTACTAAGACCCC |
| | Probe 1076 | GTTGCTGTGGGTGATAAGATAGTG |
| 1124 | Encoding | ATAAGATAGTGAGATGGGAAACTTCTGACTTGCATG |
| | Probe 1077 | GCCCGGGTGGGTGATAAGATAGTG |
| 1125 | Encoding | ATAAGATAGTGAGATGGGAGGAAACTTCCGTACTAA |
| | Probe 1078 | GACCGGCGTGGGTGATAAGATAGTG |
| 1126 | Encoding | ATAAGATAGTGAGATGGGTGGTCGAAAACTTCCGTA |
| | Probe 1079 | CTAAGTGGGTGGGTGATAAGATAGTG |
| 1127 | Encoding | ATAAGATAGTGAGATGGGATAGATGGAAATATCATG |
| | Probe 1080 | CGGATAGTGGGTGATAAGATAGTG |
| 1128 | Encoding | TGTAATAGTAAGGAGGGAGTAGAAAACTTCCGTACT |
| | Probe 1081 | AAGACAGGTGGGTGAGTGTAATAGTAA |
| 1129 | Encoding | TGTAATAGTAAGGAGGGATAAATGGAAATATCATGC |
| | Probe 1082 | GGTTAGTGGGTGAGTGTAATAGTAA |
| 1130 | Encoding | TGTAATAGTAAGGAGGGAAACGGAAATATCATGCG |
| | Probe 1083 | GTATCAGGTGGGTGAGTGTAATAGTAA |
| 1131 | Encoding | TGTAATAGTAAGGAGGGATTGCCGTACTAAGACCCC |
| | Probe 1084 | GTTGCTGGGTGAGTGTAATAGTAA |
| 1132 | Encoding | TGTAATAGTAAGGAGGGAAAACTTCTGACTTGCATG |
| | Probe 1085 | GCCCGGTGGGTGAGTGTAATAGTAA |
| 1133 | Encoding | TGTAATAGTAAGGAGGGAAGGAAACTTCCGTACTAA |
| | Probe 1086 | GACCGGCGGGTGAGTGTAATAGTAA |
| 1134 | Encoding | TGTAATAGTAAGGAGGGAGGTCGAAAACTTCCGTAC |
| | Probe 1087 | TAAGTGGTGGGTGAGTGTAATAGTAA |
| 1135 | Encoding | TGTAATAGTAAGGAGGGAATAGATGGAAATATCATG |
| | Probe 1088 | CGGATAGGGTGAGTGTAATAGTAA |
| 1136 | Encoding | TTAATATGGGTAGTTGGGTCGTGCGACTCAGCTGCA |
| | Probe 1089 | TTATCGCGGGTGTGTTAATATGGGT |
| 1137 | Encoding | TTAATATGGGTAGTTGGGCTCATGCGACTCAGCTGC |
| | Probe 1090 | ATTTACGGGTGTGTTAATATGGGT |
| 1138 | Encoding | TTAATATGGGTAGTTGGGTGGTCGACTCAGCTGCAT |
| | Probe 1091 | TATGCCCAGGGTGTGTTAATATGGGT |
| 1139 | Encoding | TTAATATGGGTAGTTGGGTGTAGACTCAGCTGCATT |
| | Probe 1092 | ATGCCCAGGGTGTGTTAATATGGGT |
| 1140 | Encoding | TTAATATGGGTAGTTGGGTGGTCGACTCAGCTGCAT |
| | Probe 1093 | TATGGCCGGGTGTGTTAATATGGGT |
| 1141 | Encoding | TTAATATGGGTAGTTGGGTCGTGCGACTCAGCTGCA |
| | Probe 1094 | TTAACGTGGGTGTGTTAATATGGGT |
| 1142 | Encoding | TTAATATGGGTAGTTGGGCGGGCGACTCAGCTGCAT |
| | Probe 1095 | TATCGCGGGTGTGTTAATATGGGT |
| 1143 | Encoding | TTAATATGGGTAGTTGGGCGGGCGACTCAGCTGCAT |
| | Probe 1096 | TATGGCCGGGTGTGTTAATATGGGT |
| 1144 | Encoding | TGTAATAGTAAGGAGGGATCGTGCGACTCAGCTGCA |
| | Probe 1097 | TTATCGCGGGTGAGTGTAATAGTAA |
| 1145 | Encoding | TGTAATAGTAAGGAGGGACTCATGCGACTCAGCTGC |
| | Probe 1098 | ATTTACGGGTGAGTGTAATAGTAA |
| 1146 | Encoding | TGTAATAGTAAGGAGGGAGGTCGACTCAGCTGCATT |
| | Probe 1099 | ATGCCCAGGGTGAGTGTAATAGTAA |
| 1147 | Encoding | TGTAATAGTAAGGAGGGAGTAGACTCAGCTGCATTA |
| | Probe 1100 | TGCCCAGGGTGAGTGTAATAGTAA |
| 1148 | Encoding | TGTAATAGTAAGGAGGGAGGTCGACTCAGCTGCATT |
| | Probe 1101 | ATGGCCGGGTGAGTGTAATAGTAA |
| 1149 | Encoding | TGTAATAGTAAGGAGGGATCGTGCGACTCAGCTGCA |
| | Probe 1102 | TTAACGTGGGTGAGTGTAATAGTAA |
| 1150 | Encoding | TGTAATAGTAAGGAGGGACGGGCGACTCAGCTGCAT |
| | Probe 1103 | TATCGCGGGTGAGTGTAATAGTAA |
| 1151 | Encoding | TGTAATAGTAAGGAGGGACGGGCGACTCAGCTGCAT |
| | Probe 1104 | TATGGCCGGGTGAGTGTAATAGTAA |
| 1152 | Encoding | GTAATAGATATGAGGGTGGTCCCATCCATATCCACA |
| | Probe 1105 | GCTCAGTGGGAGGGTAATAGATAT |
| 1153 | Encoding | GTAATAGATATGAGGGTGGACGCACTGAATTCTCTC |
| | Probe 1106 | CAAGTGTGGGAGGGTAATAGATAT |
| 1154 | Encoding | GTAATAGATATGAGGGTGAAATCTTACAACAGAGCT |
| | Probe 1107 | TTACGATGGCTGGGAGGGTAATAGATAT |
| 1155 | Encoding | GTAATAGATATGAGGGTGGCTGCTTTTACTTCAGAC |
| | Probe 1108 | TTATACAAGGCTGGGAGGGTAATAGATAT |
| 1156 | Encoding | GTAATAGATATGAGGGTGGTCAGCTGTGAAATGTAC |
| | Probe 1109 | TCCCAATGGGAGGGTAATAGATAT |
| 1157 | Encoding | GTAATAGATATGAGGGTGAGAAGGGCCTTTATTGCC |
| | Probe 1110 | ATGAGTTGGGAGGGTAATAGATAT |
| 1158 | Encoding | GTAATAGATATGAGGGTGAAAGTTCCGCTTACAATC |
| | Probe 1111 | TCTTCGATGGGAGGGTAATAGATAT |
| 1159 | Encoding | GTAATAGATATGAGGGTGCTGCTCACTCCCGTAGGT |
| | Probe 1112 | TGTGCGTGTGGGAGGGTAATAGATAT |
| 1160 | Encoding | TATAGTTATGGAGAAGGGTGTCCCATCCATATCCAC |
| | Probe 1113 | AGCTCAGGGAAGGGTATAGTTATGG |
| 1161 | Encoding | TATAGTTATGGAGAAGGGTGACGCACTGAATTCTCT |
| | Probe 1114 | CCAAGTGGGAAGGGTATAGTTATGG |
| 1162 | Encoding | TATAGTTATGGAGAAGGGAAATCTTACAACAGAGCT |
| | Probe 1115 | TTACGATGGCGGAAGGGTATAGTTATGG |
| 1163 | Encoding | TATAGTTATGGAGAAGGGTGCTGCTTTTACTTCAGA |
| | Probe 1116 | CTTATACAAGGCGGAAGGGTATAGTTATGG |
| 1164 | Encoding | TATAGTTATGGAGAAGGGTGTCAGCTGTGAAATGTA |
| | Probe 1117 | CTCCCAAGGAAGGGTATAGTTATGG |
| 1165 | Encoding | TATAGTTATGGAGAAGGGAGAAGGGCCTTTATTGCC |
| | Probe 1118 | ATGAGTGGAAGGGTATAGTTATGG |
| 1166 | Encoding | TATAGTTATGGAGAAGGGAAAGTTCCGCTTACAATC |
| | Probe 1119 | TCTTCGAGGAAGGGTATAGTTATGG |
| 1167 | Encoding | TATAGTTATGGAGAAGGGCTGCTCACTCCCGTAGGT |
| | Probe 1120 | TGTGCGTGGGAAGGGTATAGTTATGG |
| 1168 | Encoding | GGAATTTAGTGAGAAGGGAGAGTCAGGTACTGTCAC |
| | Probe 1121 | TTTCAAGTGGGTGTTGGAATTTAGTG |
| 1169 | Encoding | GGAATTTAGTGAGAAGGGTGAATCAGGTACTGTCAC |
| | Probe 1122 | TTTCAAGTGGGTGTTGGAATTTAGTG |
| 1170 | Encoding | GGAATTTAGTGAGAAGGGAATCAGGTACTGTCACTT |
| | Probe 1123 | TCTTAGGTGGGTGTTGGAATTTAGTG |
| 1171 | Encoding | GGAATTTAGTGAGAAGGGCCCTCTTAGTCAGGTACT |
| | Probe 1124 | GTCACAAAGGGTGTTGGAATTTAGTG |
| 1172 | Encoding | GGAATTTAGTGAGAAGGGAGAGTCAGGTACTGTCAC |
| | Probe 1125 | TTTCTAGGTGGGTGTTGGAATTTAGTG |
| 1173 | Encoding | GGAATTTAGTGAGAAGGGAGAGTCAGGTACTGTCAC |
| | Probe 1126 | TTTGAAGGGTGTTGGAATTTAGTG |
| 1174 | Encoding | GGAATTTAGTGAGAAGGGATCAGGTACTGTCACTTT |
| | Probe 1127 | CTTCGGAGGGTGTTGGAATTTAGTG |
| 1175 | Encoding | GGAATTTAGTGAGAAGGGTGAATCAGGTACTGTCAC |
| | Probe 1128 | TTTCTAGGTGGGTGTTGGAATTTAGTG |
| 1176 | Encoding | TATAGTTATGGAGAAGGGAGAGTCAGGTACTGTCAC |
| | Probe 1129 | TTTCAAGGGAAGGGTATAGTTATGG |
| 1177 | Encoding | TATAGTTATGGAGAAGGGTGAATCAGGTACTGTCAC |
| | Probe 1130 | TTTCAAGGGAAGGGTATAGTTATGG |
| 1178 | Encoding | TATAGTTATGGAGAAGGGAATCAGGTACTGTCACTT |
| | Probe 1131 | TCTTAGGTGGAAGGGTATAGTTATGG |
| 1179 | Encoding | TATAGTTATGGAGAAGGGCCCTCTTAGTCAGGTACT |
| | Probe 1132 | GTCACAAAGGAAGGGTATAGTTATGG |
| 1180 | Encoding | TATAGTTATGGAGAAGGGAGAGTCAGGTACTGTCAC |
| | Probe 1133 | TTTCTAGGTGGAAGGGTATAGTTATGG |
| 1181 | Encoding | TATAGTTATGGAGAAGGGAGAGTCAGGTACTGTCAC |
| | Probe 1134 | TTTGAAGGAAGGGTATAGTTATGG |
| 1182 | Encoding | TATAGTTATGGAGAAGGGATCAGGTACTGTCACTTT |
| | Probe 1135 | CTTCGGAGGAAGGGTATAGTTATGG |
| 1183 | Encoding | TATAGTTATGGAGAAGGGTGAATCAGGTACTGTCAC |
| | Probe 1136 | TTTCTAGGTGGAAGGGTATAGTTATGG |
| 1184 | Encoding | ATAAGATAGTGAGATGGGATCAGTTCGTTATGCAAT |
| | Probe 1137 | CCTGTCGTGGGTGATAAGATAGTG |
| 1185 | Encoding | ATAAGATAGTGAGATGGGCGAGGCACCGAGGATTC |
| | Probe 1138 | CTCCCGCTGTGGGTGATAAGATAGTG |
| 1186 | Encoding | ATAAGATAGTGAGATGGGTACGGCCCATCTTTTACC |
| | Probe 1139 | GAATATTAGTGGGTGATAAGATAGTG |
| 1187 | Encoding | ATAAGATAGTGAGATGGGCGACAATTATTTTCGCTC |
| | Probe 1140 | GACTTCGTGTGGGTGATAAGATAGTG |
| 1188 | Encoding | ATAAGATAGTGAGATGGGTGACACTGGGTTTTTGTG |
| | Probe 1141 | CTTTCGAGTGGGTGATAAGATAGTG |
| 1189 | Encoding | ATAAGATAGTGAGATGGGCTAGGGCCCATCTTTTAC |
| | Probe 1142 | CGAATATTAGTGGGTGATAAGATAGTG |
| 1190 | Encoding | ATAAGATAGTGAGATGGGCGAACTTTGTTTCCAGCC |
| | Probe 1143 | ATTCATGTGGGTGATAAGATAGTG |
| 1191 | Encoding | ATAAGATAGTGAGATGGGCGACAATTATTTTCGCTC |
| | Probe 1144 | GACTACGGTGGGTGATAAGATAGTG |
| 1192 | Encoding | TATAGTTATGGAGAAGGGATCAGTTCGTTATGCAAT |
| | Probe 1145 | CCTGTCGGAAGGGTATAGTTATGG |
| 1193 | Encoding | TATAGTTATGGAGAAGGGCGAGGCACCGAGGATTCC |
| | Probe 1146 | TCCCGCTGGAAGGGTATAGTTATGG |
| 1194 | Encoding | TATAGTTATGGAGAAGGGTACGGCCCATCTTTTACC |
| | Probe 1147 | GAATATTAGGAAGGGTATAGTTATGG |
| 1195 | Encoding | TATAGTTATGGAGAAGGGCGACAATTATTTTCGCTC |
| | Probe 1148 | GACTTCGTGGAAGGGTATAGTTATGG |
| 1196 | Encoding | TATAGTTATGGAGAAGGGTGACACTGGGTTTTTGTG |
| | Probe 1149 | CTTTCGAGGAAGGGTATAGTTATGG |
| 1197 | Encoding | TATAGTTATGGAGAAGGGCTAGGGCCCATCTTTTAC |
| | Probe 1150 | CGAATATTAGGAAGGGTATAGTTATGG |
| 1198 | Encoding | TATAGTTATGGAGAAGGGCGAACTTTGTTTCCAGCC |
| | Probe 1151 | ATTCATGGAAGGGTATAGTTATGG |
| 1199 | Encoding | TATAGTTATGGAGAAGGGCGACAATTATTTTCGCTC |
| | Probe 1152 | GACTACGGGAAGGGTATAGTTATGG |
| 1200 | Encoding | TTAATATGGGTAGTTGGGTGTGGGAATTCCGATCTC |
| | Probe 1153 | CCCTTGGTGGGTGTGTTAATATGGGT |
| 1201 | Encoding | TTAATATGGGTAGTTGGGTGTGGGAATTCCGATCTC |
| | Probe 1154 | CCCTAGGCGGGTGTGTTAATATGGGT |
| 1202 | Encoding | TTAATATGGGTAGTTGGGATGCGCCTACTACCTAAT |
| | Probe 1155 | GGGCGCGTGGGTGTGTTAATATGGGT |
| 1203 | Encoding | TTAATATGGGTAGTTGGGTGTGGGAATTCCGATCTC |
| | Probe 1156 | CCCATGTGGGTGTGTTAATATGGGT |
| 1204 | Encoding | TTAATATGGGTAGTTGGGATACGCCTACTACCTAAT |
| | Probe 1157 | GGGAGCGGGTGTGTTAATATGGGT |
| 1205 | Encoding | TTAATATGGGTAGTTGGGTGTGGGAATTCCGATCTC |
| | Probe 1158 | CCCTTGGTGGGTGTGTTAATATGGGT |
| 1206 | Encoding | TTAATATGGGTAGTTGGGTGGGCCTACTACCTAATG |
| | Probe 1159 | GGCCCGCGGGTGTGTTAATATGGGT |
| 1207 | Encoding | TTAATATGGGTAGTTGGGTGGGCCTACTACCTAATG |
| | Probe 1160 | GGCGCGTGGGTGTGTTAATATGGGT |
| 1208 | Encoding | TATAGTTATGGAGAAGGGTGTGGGAATTCCGATCTC |
| | Probe 1161 | CCCTTGGTGGAAGGGTATAGTTATGG |
| 1209 | Encoding | TATAGTTATGGAGAAGGGTGTGGGAATTCCGATCTC |
| | Probe 1162 | CCCTAGGCGGAAGGGTATAGTTATGG |
| 1210 | Encoding | TATAGTTATGGAGAAGGGATGCGCCTACTACCTAAT |
| | Probe 1163 | GGGCGCGGGAAGGGTATAGTTATGG |
| 1211 | Encoding | TATAGTTATGGAGAAGGGTGTGGGAATTCCGATCTC |
| | Probe 1164 | CCCATGGGAAGGGTATAGTTATGG |
| 1212 | Encoding | TATAGTTATGGAGAAGGGATACGCCTACTACCTAAT |
| | Probe 1165 | GGGAGCGGAAGGGTATAGTTATGG |
| 1213 | Encoding | TATAGTTATGGAGAAGGGTGTGGGAATTCCGATCTC |
| | Probe 1166 | CCCTTGGTGGAAGGGTATAGTTATGG |
| 1214 | Encoding | TATAGTTATGGAGAAGGGTGGGCCTACTACCTAATG |
| | Probe 1167 | GGCCCGCGGAAGGGTATAGTTATGG |
| 1215 | Encoding | TATAGTTATGGAGAAGGGTGGGCCTACTACCTAATG |
| | Probe 1168 | GGCGCGGGAAGGGTATAGTTATGG |
| 1216 | Encoding | GGTAATTGAGTAGAAGGGATACACCCTAATTACCAG |
| | Probe 1169 | TCCATGTGGGATGAGGTAATTGAGT |
| 1217 | Encoding | GGTAATTGAGTAGAAGGGTGTCGCGAGCTCATCTTT |
| | Probe 1170 | GGACCTAGGGATGAGGTAATTGAGT |
| 1218 | Encoding | GGTAATTGAGTAGAAGGGCAAGTCCCCGATTAAAGA |
| | Probe 1171 | TCTTATGTGGGATGAGGTAATTGAGT |
| 1219 | Encoding | GGTAATTGAGTAGAAGGGATTCCCCAGATTTCACTT |
| | Probe 1172 | CTGTGAGGGATGAGGTAATTGAGT |
| 1220 | Encoding | GGTAATTGAGTAGAAGGGCCTGGGTCAATACCTCCC |
| | Probe 1173 | ACAGGAGGGATGAGGTAATTGAGT |
| 1221 | Encoding | GGTAATTGAGTAGAAGGGTGGATGTATCAACTAACC |
| | Probe 1174 | GTAAGGCAAGGGATGAGGTAATTGAGT |
| 1222 | Encoding | GGTAATTGAGTAGAAGGGAAATTCCCTCTGTATGAC |
| | Probe 1175 | TGCGTAGGGATGAGGTAATTGAGT |
| 1223 | Encoding | GGTAATTGAGTAGAAGGGTGCCGTTATCCCCCATCC |
| | Probe 1176 | AAAGCGTGGGATGAGGTAATTGAGT |
| 1224 | Encoding | TATAGTTATGGAGAAGGGATACACCCTAATTACCAG |
| | Probe 1177 | TCCATGGGAAGGGTATAGTTATGG |
| 1225 | Encoding | TATAGTTATGGAGAAGGGTGTCGCGAGCTCATCTTT |
| | Probe 1178 | GGACCTAGGAAGGGTATAGTTATGG |
| 1226 | Encoding | TATAGTTATGGAGAAGGGCAAGTCCCCGATTAAAGA |
| | Probe 1179 | TCTTATGGGAAGGGTATAGTTATGG |
| 1227 | Encoding | TATAGTTATGGAGAAGGGATTCCCCAGATTTCACTT |
| | Probe 1180 | CTGTGAGGAAGGGTATAGTTATGG |
| 1228 | Encoding | TATAGTTATGGAGAAGGGCCTGGGTCAATACCTCCC |
| | Probe 1181 | ACAGGAGGAAGGGTATAGTTATGG |
| 1229 | Encoding | TATAGTTATGGAGAAGGGTGGATGTATCAACTAACC |
| | Probe 1182 | GTAAGGCAAGGAAGGGTATAGTTATGG |
| 1230 | Encoding | TATAGTTATGGAGAAGGGAAATTCCCTCTGTATGAC |
| | Probe 1183 | TGCGTAGGAAGGGTATAGTTATGG |
| 1231 | Encoding | TATAGTTATGGAGAAGGGTGCCGTTATCCCCCATCC |
| | Probe 1184 | AAAGCGTGGAAGGGTATAGTTATGG |
| 1232 | Encoding | GTAATAGATATGAGGGTGCGACTCTTTACAGTTGGC |
| | Probe 1185 | TCAGTCTGGGAGGGTAATAGATAT |
| 1233 | Encoding | GTAATAGATATGAGGGTGAAGATCACTGTGTTGCTT |
| | Probe 1186 | CCCAGATGGGAGGGTAATAGATAT |
| 1234 | Encoding | GTAATAGATATGAGGGTGTAGGCGATAAAATTAGTA |
| | Probe 1187 | TATGCGCATTGGGAGGGTAATAGATAT |
| 1235 | Encoding | GTAATAGATATGAGGGTGGAAAAAGTAAACTTTCGA |
| | Probe 1188 | TTAAGTTCCAATGGGAGGGTAATAGATAT |
| 1236 | Encoding | GTAATAGATATGAGGGTGACGCCTCTTTACAGTTGG |
| | Probe 1189 | CTCTGTTGGGAGGGTAATAGATAT |
| 1237 | Encoding | GTAATAGATATGAGGGTGGAACATCACTGTGTTGCT |
| | Probe 1190 | TCCGAGTGGGAGGGTAATAGATAT |
| 1238 | Encoding | GTAATAGATATGAGGGTGATATGCGATAAAATTAGT |
| | Probe 1191 | ATATGCGCATTGGGAGGGTAATAGATAT |
| 1239 | Encoding | GTAATAGATATGAGGGTGGTTGTAAACTTTCGATTA |
| | Probe 1192 | AGTTCGAAGTGGGAGGGTAATAGATAT |
| 1240 | Encoding | GATAAGTAAGTAGGGATGCGACTCTTTACAGTTGGC |
| | Probe 1193 | TCAGTCGGTGGAGGATAAGTAAGT |
| 1241 | Encoding | GATAAGTAAGTAGGGATGAAGATCACTGTGTTGCTT |
| | Probe 1194 | CCCAGAGGTGGAGGATAAGTAAGT |
| 1242 | Encoding | GATAAGTAAGTAGGGATGTAGGCGATAAAATTAGTA |
| | Probe 1195 | TATGCGCATGGTGGAGGATAAGTAAGT |
| 1243 | Encoding | GATAAGTAAGTAGGGATGGAAAAAGTAAACTTTCG |
| | Probe 1196 | ATTAAGTTCCAAGGTGGAGGATAAGTAAGT |
| 1244 | Encoding | GATAAGTAAGTAGGGATGACGCCTCTTTACAGTTGG |
| | Probe 1197 | CTCTGTGGTGGAGGATAAGTAAGT |
| 1245 | Encoding | GATAAGTAAGTAGGGATGGAACATCACTGTGTTGCT |
| | Probe 1198 | TCCGAGGGTGGAGGATAAGTAAGT |
| 1246 | Encoding | GATAAGTAAGTAGGGATGATATGCGATAAAATTAGT |
| | Probe 1199 | ATATGCGCATGGTGGAGGATAAGTAAGT |
| 1247 | Encoding | GATAAGTAAGTAGGGATGGTTGTAAACTTTCGATTA |
| | Probe 1200 | AGTTCGAAGGGTGGAGGATAAGTAAGT |
| 1248 | Encoding | GGAATTTAGTGAGAAGGGTCCGATGTCAAGGACTGG |
| | Probe 1201 | TAAGCAAGGGTGTTGGAATTTAGTG |
| 1249 | Encoding | GGAATTTAGTGAGAAGGGTGCCTCGCCTCACTCTGT |
| | Probe 1202 | TGGCTGGTGGGTGTTGGAATTTAGTG |
| 1250 | Encoding | GGAATTTAGTGAGAAGGGTGTCGGATGTCAAGGACT |
| | Probe 1203 | GGTATCCGGGTGTTGGAATTTAGTG |
| 1251 | Encoding | GGAATTTAGTGAGAAGGGCGGGCAGGCTTATGCGGT |
| | Probe 1204 | ATTTCGTGGGTGTTGGAATTTAGTG |
| 1252 | Encoding | GGAATTTAGTGAGAAGGGACGTCTTCCCTCCGGAGA |
| | Probe 1205 | GTTCCGAGCGGGTGTTGGAATTTAGTG |
| 1253 | Encoding | GGAATTTAGTGAGAAGGGAGACCTCCGGAGAGTTCC |
| | Probe 1206 | GTCCCGTGGGTGTTGGAATTTAGTG |
| 1254 | Encoding | GGAATTTAGTGAGAAGGGTGGAGTTATCGAGCCTGC |
| | Probe 1207 | CTTGCTGGGTGTTGGAATTTAGTG |
| 1255 | Encoding | GGAATTTAGTGAGAAGGGTGGACAGGCTTATGCGGT |
| | Probe 1208 | ATTACGTGGGTGTTGGAATTTAGTG |
| 1256 | Encoding | GATAAGTAAGTAGGGATGTCCGATGTCAAGGACTGG |
| | Probe 1209 | TAAGCAAGGTGGAGGATAAGTAAGT |
| 1257 | Encoding | GATAAGTAAGTAGGGATGGCCTCGCCTCACTCTGTT |
| | Probe 1210 | GGCTGGTGGTGGAGGATAAGTAAGT |
| 1258 | Encoding | GATAAGTAAGTAGGGATGGTCGGATGTCAAGGACTG |
| | Probe 1211 | GTATCCGGTGGAGGATAAGTAAGT |
| 1259 | Encoding | GATAAGTAAGTAGGGATGCGGGCAGGCTTATGCGGT |
| | Probe 1212 | ATTTCGGGTGGAGGATAAGTAAGT |
| 1260 | Encoding | GATAAGTAAGTAGGGATGACGTCTTCCCTCCGGAGA |
| | Probe 1213 | GTTCCGAGCGGTGGAGGATAAGTAAGT |
| 1261 | Encoding | GATAAGTAAGTAGGGATGAGACCTCCGGAGAGTTCC |
| | Probe 1214 | GTCCCGGGTGGAGGATAAGTAAGT |
| 1262 | Encoding | GATAAGTAAGTAGGGATGTGGAGTTATCGAGCCTGC |
| | Probe 1215 | CTTGCTGGTGGAGGATAAGTAAGT |
| 1263 | Encoding | GATAAGTAAGTAGGGATGGGACAGGCTTATGCGGTA |
| | Probe 1216 | TTACGTGGTGGAGGATAAGTAAGT |
| 1264 | Encoding | ATAAGATAGTGAGATGGGTGGCTCAGTTTTTACCCC |
| | Probe 1217 | TGTTGGGTGGGTGATAAGATAGTG |
| 1265 | Encoding | ATAAGATAGTGAGATGGGCTGCTCCCTCCTGGTTAG |
| | Probe 1218 | GTTCCCGTGGGTGATAAGATAGTG |
| 1266 | Encoding | ATAAGATAGTGAGATGGGTGACGTGGTCGCTTCTCT |
| | Probe 1219 | TTGAAAGTGGGTGATAAGATAGTG |
| 1267 | Encoding | ATAAGATAGTGAGATGGGTGTACCTCAGTTTTTACC |
| | Probe 1220 | CCTGATGGTGGGTGATAAGATAGTG |
| 1268 | Encoding | ATAAGATAGTGAGATGGGCTGCTCCCTCCTGGTTAG |
| | Probe 1221 | GTTGCCAGTGGGTGATAAGATAGTG |
| 1269 | Encoding | ATAAGATAGTGAGATGGGTGTGCCTCAGTTTTTACC |
| | Probe 1222 | CCTGATGGTGGGTGATAAGATAGTG |
| 1270 | Encoding | ATAAGATAGTGAGATGGGTGTACCTCAGTTTTTACC |
| | Probe 1223 | CCTCATGTGGGTGATAAGATAGTG |
| 1271 | Encoding | ATAAGATAGTGAGATGGGTGGACTGGTTAGGTTGGG |
| | Probe 1224 | TCACGCCGTGGGTGATAAGATAGTG |
| 1272 | Encoding | GATAAGTAAGTAGGGATGTGGCTCAGTTTTTACCCC |
| | Probe 1225 | TGTTGGTGGTGGAGGATAAGTAAGT |
| 1273 | Encoding | GATAAGTAAGTAGGGATGCTGCTCCCTCCTGGTTAG |
| | Probe 1226 | GTTCCCGGTGGAGGATAAGTAAGT |
| 1274 | Encoding | GATAAGTAAGTAGGGATGTGACGTGGTCGCTTCTCT |
| | Probe 1227 | TTGAAAGGTGGAGGATAAGTAAGT |
| 1275 | Encoding | GATAAGTAAGTAGGGATGTGTACCTCAGTTTTTACC |
| | Probe 1228 | CCTGATGGGTGGAGGATAAGTAAGT |
| 1276 | Encoding | GATAAGTAAGTAGGGATGCTGCTCCCTCCTGGTTAG |
| | Probe 1229 | GTTGCCAGGTGGAGGATAAGTAAGT |
| 1277 | Encoding | GATAAGTAAGTAGGGATGGTGCCTCAGTTTTTACCC |
| | Probe 1230 | CTGATGGGTGGAGGATAAGTAAGT |
| 1278 | Encoding | GATAAGTAAGTAGGGATGTGTACCTCAGTTTTTACC |
| | Probe 1231 | CCTCATGGTGGAGGATAAGTAAGT |
| 1279 | Encoding | GATAAGTAAGTAGGGATGGGACTGGTTAGGTTGGGT |
| | Probe 1232 | CACGCCGGTGGAGGATAAGTAAGT |
| 1280 | Encoding | TTAATATGGGTAGTTGGGTCTGTCGAAAACACGGTG |
| | Probe 1233 | AAGAGGTGGGTGTGTTAATATGGGT |
| 1281 | Encoding | TTAATATGGGTAGTTGGGCAGAGTCTGGATGATCAT |
| | Probe 1234 | CCTGAGTGGGTGTGTTAATATGGGT |
| 1282 | Encoding | TTAATATGGGTAGTTGGGTATTCTCGCTTATAAAAGC |
| | Probe 1235 | AGTAATGGGTGTGTTAATATGGGT |
| 1283 | Encoding | TTAATATGGGTAGTTGGGTCAAGCTAATAGTCTGAA |
| | Probe 1236 | TGGTTGTCGTGGGTGTGTTAATATGGGT |
| 1284 | Encoding | TTAATATGGGTAGTTGGGCAGTACCCAAAACTGCTA |
| | Probe 1237 | GTATCGTAGGGTGTGTTAATATGGGT |
| 1285 | Encoding | TTAATATGGGTAGTTGGGATGGACCAGGAAACGTAT |
| | Probe 1238 | TCAGGCGGGTGTGTTAATATGGGT |
| 1286 | Encoding | TTAATATGGGTAGTTGGGCCCGTCCTACCAGAAAAA |
| | Probe 1239 | TCCAAGACGGGTGTGTTAATATGGGT |
| 1287 | Encoding | TTAATATGGGTAGTTGGGTCTGTCGAAAACACGGTG |
| | Probe 1240 | AAGCGGAGGGTGTGTTAATATGGGT |
| 1288 | Encoding | GATAAGTAAGTAGGGATGTCTGTCGAAAACACGGTG |
| | Probe 1241 | AAGAGGTGGTGGAGGATAAGTAAGT |
| 1289 | Encoding | GATAAGTAAGTAGGGATGCAGAGTCTGGATGATCAT |
| | Probe 1242 | CCTGAGGGTGGAGGATAAGTAAGT |
| 1290 | Encoding | GATAAGTAAGTAGGGATGTATTCTCGCTTATAAAAG |
| | Probe 1243 | CAGTAATGGTGGAGGATAAGTAAGT |
| 1291 | Encoding | GATAAGTAAGTAGGGATGTCAAGCTAATAGTCTGAA |
| | Probe 1244 | TGGTTGTCGGGTGGAGGATAAGTAAGT |
| 1292 | Encoding | GATAAGTAAGTAGGGATGCAGTACCCAAAACTGCTA |
| | Probe 1245 | GTATCGTAGGTGGAGGATAAGTAAGT |
| 1293 | Encoding | GATAAGTAAGTAGGGATGATGGACCAGGAAACGTA |
| | Probe 1246 | TTCAGGCGGTGGAGGATAAGTAAGT |
| 1294 | Encoding | GATAAGTAAGTAGGGATGCCCGTCCTACCAGAAAAA |
| | Probe 1247 | TCCAAGACGGTGGAGGATAAGTAAGT |
| 1295 | Encoding | GATAAGTAAGTAGGGATGTCTGTCGAAAACACGGTG |
| | Probe 1248 | AAGCGGAGGTGGAGGATAAGTAAGT |
| 1296 | Encoding | GGTAATTGAGTAGAAGGGTGAGCGTCAGTACACCGT |
| | Probe 1249 | CCAGGTCGGGATGAGGTAATTGAGT |
| 1297 | Encoding | GGTAATTGAGTAGAAGGGACGATGCTGCCGGCAGG |
| | Probe 1250 | ATGTGTTGGGATGAGGTAATTGAGT |
| 1298 | Encoding | GGTAATTGAGTAGAAGGGTGTGCAGTCATCGGATCT |
| | Probe 1251 | GCCTAGCGGGATGAGGTAATTGAGT |
| 1299 | Encoding | GGTAATTGAGTAGAAGGGAGGTCCGAAAAAATTCC |
| | Probe 1252 | GCCCCGGAGGGATGAGGTAATTGAGT |
| 1300 | Encoding | GGTAATTGAGTAGAAGGGTGGACCGAAAAAATTCC |
| | Probe 1253 | GCCCCGGAGGGATGAGGTAATTGAGT |
| 1301 | Encoding | GGTAATTGAGTAGAAGGGTGGTCCGCACCGCATGCG |
| | Probe 1254 | CTTTGGCGGGATGAGGTAATTGAGT |
| 1302 | Encoding | GGTAATTGAGTAGAAGGGCGTGCATCCCTCTGTTAA |
| | Probe 1255 | CGCGTAGGGATGAGGTAATTGAGT |
| 1303 | Encoding | GGTAATTGAGTAGAAGGGTATGAAGTACTCCATCGC |
| | Probe 1256 | TCAGCGTGGGATGAGGTAATTGAGT |
| 1304 | Encoding | GATAAGTAAGTAGGGATGGAGCGTCAGTACACCGTC |
| | Probe 1257 | CAGGTCGGTGGAGGATAAGTAAGT |
| 1305 | Encoding | GATAAGTAAGTAGGGATGACGATGCTGCCGGCAGG |
| | Probe 1258 | ATGTGTTGGTGGAGGATAAGTAAGT |
| 1306 | Encoding | GATAAGTAAGTAGGGATGGTGCAGTCATCGGATCTG |
| | Probe 1259 | CCTAGCGGTGGAGGATAAGTAAGT |
| 1307 | Encoding | GATAAGTAAGTAGGGATGAGGTCCGAAAAAATTCC |
| | Probe 1260 | GCCCCGGAGGTGGAGGATAAGTAAGT |
| 1308 | Encoding | GATAAGTAAGTAGGGATGGGACCGAAAAAATTCCG |
| | Probe 1261 | CCCCGGAGGTGGAGGATAAGTAAGT |
| 1309 | Encoding | GATAAGTAAGTAGGGATGGGTCCGCACCGCATGCGC |
| | Probe 1262 | TTTGGCGGTGGAGGATAAGTAAGT |
| 1310 | Encoding | GATAAGTAAGTAGGGATGCGTGCATCCCTCTGTTAA |
| | Probe 1263 | CGCGTAGGTGGAGGATAAGTAAGT |
| 1311 | Encoding | GATAAGTAAGTAGGGATGTATGAAGTACTCCATCGC |
| | Probe 1264 | TCAGCGGGTGGAGGATAAGTAAGT |
| 1312 | Encoding | GTAATAGATATGAGGGTGGGTCGGCAGCGCAGGATT |
| | Probe 1265 | ATGGCCTGGGAGGGTAATAGATAT |
| 1313 | Encoding | GTAATAGATATGAGGGTGTACGCAGCGCAGGATTAT |
| | Probe 1266 | GCGCATTGGGAGGGTAATAGATAT |
| 1314 | Encoding | GTAATAGATATGAGGGTGACGCAGCGCAGGATTATG |
| | Probe 1267 | CGGATATGGGAGGGTAATAGATAT |
| 1315 | Encoding | GTAATAGATATGAGGGTGGGTCGGCAGCGCAGGATT |
| | Probe 1268 | ATGCCCATGGGAGGGTAATAGATAT |
| 1316 | Encoding | GTAATAGATATGAGGGTGGTAGGCAGCGCAGGATTA |
| | Probe 1269 | TGCGGATATGGGAGGGTAATAGATAT |
| 1317 | Encoding | GTAATAGATATGAGGGTGGTAGGCAGCGCAGGATTA |
| | Probe 1270 | TGCGCATTGGGAGGGTAATAGATAT |
| 1318 | Encoding | GTAATAGATATGAGGGTGGTAGGCAGCGCAGGATTA |
| | Probe 1271 | TGCCCATGGGAGGGTAATAGATAT |
| 1319 | Encoding | GTAATAGATATGAGGGTGTACGCAGCGCAGGATTAT |
| | Probe 1272 | GCGGATATGGGAGGGTAATAGATAT |
| 1320 | Encoding | AGTATTATTAGGGTGAGGTGGTCGGCAGCGCAGGAT |
| | Probe 1273 | TATGGCCGGGTTGGAGTATTATTAG |
| 1321 | Encoding | AGTATTATTAGGGTGAGGTACGCAGCGCAGGATTAT |
| | Probe 1274 | GCGCATGGGTTGGAGTATTATTAG |
| 1322 | Encoding | AGTATTATTAGGGTGAGGACGCAGCGCAGGATTATG |
| | Probe 1275 | CGGATAGGGTTGGAGTATTATTAG |
| 1323 | Encoding | AGTATTATTAGGGTGAGGTGGTCGGCAGCGCAGGAT |
| | Probe 1276 | TATGCCCAGGGTTGGAGTATTATTAG |
| 1324 | Encoding | AGTATTATTAGGGTGAGGGTAGGCAGCGCAGGATTA |
| | Probe 1277 | TGCGGATAGGGTTGGAGTATTATTAG |
| 1325 | Encoding | AGTATTATTAGGGTGAGGGTAGGCAGCGCAGGATTA |
| | Probe 1278 | TGCGCATGGGTTGGAGTATTATTAG |
| 1326 | Encoding | AGTATTATTAGGGTGAGGGTAGGCAGCGCAGGATTA |
| | Probe 1279 | TGCCCAGGGTTGGAGTATTATTAG |
| 1327 | Encoding | AGTATTATTAGGGTGAGGTACGCAGCGCAGGATTAT |
| | Probe 1280 | GCGGATAGGGTTGGAGTATTATTAG |
| 1328 | Encoding | GGAATTTAGTGAGAAGGGAGTACACCCAGTATCAAC |
| | Probe 1281 | TGCTTAGGGTGTTGGAATTTAGTG |
| 1329 | Encoding | GGAATTTAGTGAGAAGGGACCGGTTCAGACTCTCGT |
| | Probe 1282 | CCAAACGGGTGTTGGAATTTAGTG |
| 1330 | Encoding | GGAATTTAGTGAGAAGGGCAGCACATCATTCAGTTG |
| | Probe 1283 | CAAAAGTGGGTGTTGGAATTTAGTG |
| 1331 | Encoding | GGAATTTAGTGAGAAGGGTCTCTTTCGGGATTAGCA |
| | Probe 1284 | TCACCAGTGGGTGTTGGAATTTAGTG |
| 1332 | Encoding | GGAATTTAGTGAGAAGGGTGGGCGGAAGAACTATG |
| | Probe 1285 | CCATCCCCGGGTGTTGGAATTTAGTG |
| 1333 | Encoding | GGAATTTAGTGAGAAGGGTGGTCGGAAGAACTATGC |
| | Probe 1286 | CATCCCCGGGTGTTGGAATTTAGTG |
| 1334 | Encoding | GGAATTTAGTGAGAAGGGACTGAAGTTCTTTAATAG |
| | Probe 1287 | TTCTACCAACGTGGGTGTTGGAATTTAGTG |
| 1335 | Encoding | GGAATTTAGTGAGAAGGGTGGAGTTCTTTAATAGTT |
| | Probe 1288 | CTACCATGGCCGGGTGTTGGAATTTAGTG |
| 1336 | Encoding | AGTATTATTAGGGTGAGGAGTACACCCAGTATCAAC |
| | Probe 1289 | TGCTTAGGGTTGGAGTATTATTAG |
| 1337 | Encoding | AGTATTATTAGGGTGAGGACCGGTTCAGACTCTCGT |
| | Probe 1290 | CCAAACGGGTTGGAGTATTATTAG |
| 1338 | Encoding | AGTATTATTAGGGTGAGGCAGCACATCATTCAGTTG |
| | Probe 1291 | CAAAAGTGGGTTGGAGTATTATTAG |
| 1339 | Encoding | AGTATTATTAGGGTGAGGTCTCTTTCGGGATTAGCAT |
| | Probe 1292 | CACCAGTGGGTTGGAGTATTATTAG |
| 1340 | Encoding | AGTATTATTAGGGTGAGGTGGGCGGAAGAACTATGC |
| | Probe 1293 | CATCCCCGGGTTGGAGTATTATTAG |
| 1341 | Encoding | AGTATTATTAGGGTGAGGTGGTCGGAAGAACTATGC |
| | Probe 1294 | CATCCCCGGGTTGGAGTATTATTAG |
| 1342 | Encoding | AGTATTATTAGGGTGAGGACTGAAGTTCTTTAATAG |
| | Probe 1295 | TTCTACCAACGTGGGTTGGAGTATTATTAG |
| 1343 | Encoding | AGTATTATTAGGGTGAGGTGGAGTTCTTTAATAGTTC |
| | Probe 1296 | TACCATGGCCGGGTTGGAGTATTATTAG |
| 1344 | Encoding | ATAAGATAGTGAGATGGGATCGGAGCTTTCTTGCAG |
| | Probe 1297 | GGTAGGCGTGGGTGATAAGATAGTG |
| 1345 | Encoding | ATAAGATAGTGAGATGGGATCGGAGCTTTCTTGCAG |
| | Probe 1298 | GGTTGGGTGGGTGATAAGATAGTG |
| 1346 | Encoding | ATAAGATAGTGAGATGGGTCTTCACATTCAACTTAT |
| | Probe 1299 | CCTCCGCGGTGGGTGATAAGATAGTG |
| 1347 | Encoding | ATAAGATAGTGAGATGGGTGCAGTCCCATTAGAGTG |
| | Probe 1300 | CTCAACGTGGGTGATAAGATAGTG |
| 1348 | Encoding | ATAAGATAGTGAGATGGGAATCTATTGACTTCGGGT |
| | Probe 1301 | GTTTGGGTGGGTGATAAGATAGTG |
| 1349 | Encoding | ATAAGATAGTGAGATGGGTCGGAGCTTTCTTGCAGG |
| | Probe 1302 | GTAGGCGTGGGTGATAAGATAGTG |
| 1350 | Encoding | ATAAGATAGTGAGATGGGTGCAGTCCCATTAGAGTG |
| | Probe 1303 | CTCTACGGTGGGTGATAAGATAGTG |
| 1351 | Encoding | ATAAGATAGTGAGATGGGATCTTCACATTCAACTTA |
| | Probe 1304 | TCCTCCGCGGTGGGTGATAAGATAGTG |
| 1352 | Encoding | AGTATTATTAGGGTGAGGATCGGAGCTTTCTTGCAG |
| | Probe 1305 | GGTAGGCGGGTTGGAGTATTATTAG |
| 1353 | Encoding | AGTATTATTAGGGTGAGGATCGGAGCTTTCTTGCAG |
| | Probe 1306 | GGTTGGTGGGTTGGAGTATTATTAG |
| 1354 | Encoding | AGTATTATTAGGGTGAGGTCTTCACATTCAACTTATC |
| | Probe 1307 | CTCCGCGTGGGTTGGAGTATTATTAG |
| 1355 | Encoding | AGTATTATTAGGGTGAGGTGCAGTCCCATTAGAGTG |
| | Probe 1308 | CTCAACGGGTTGGAGTATTATTAG |
| 1356 | Encoding | AGTATTATTAGGGTGAGGAATCTATTGACTTCGGGT |
| | Probe 1309 | GTTTGGTGGGTTGGAGTATTATTAG |
| 1357 | Encoding | AGTATTATTAGGGTGAGGTCGGAGCTTTCTTGCAGG |
| | Probe 1310 | GTAGGCGGGTTGGAGTATTATTAG |
| 1358 | Encoding | AGTATTATTAGGGTGAGGTGCAGTCCCATTAGAGTG |
| | Probe 1311 | CTCTACGTGGGTTGGAGTATTATTAG |
| 1359 | Encoding | AGTATTATTAGGGTGAGGATCTTCACATTCAACTTAT |
| | Probe 1312 | CCTCCGCGTGGGTTGGAGTATTATTAG |
| 1360 | Encoding | TTAATATGGGTAGTTGGGTGAAGTACAAACAGGATG |
| | Probe 1313 | TCCCATCCGATGTGGGTGTGTTAATATGGGT |
| 1361 | Encoding | TTAATATGGGTAGTTGGGTAGTGGTACAAACAGGAT |
| | Probe 1314 | GTCCGTAGGGTGTGTTAATATGGGT |
| 1362 | Encoding | TTAATATGGGTAGTTGGGTAGTGGTACAAACAGGAT |
| | Probe 1315 | GTCGGTGGGTGTGTTAATATGGGT |
| 1363 | Encoding | TTAATATGGGTAGTTGGGAAATACAAACAGGATGTC |
| | Probe 1316 | CCATCCGATGTGGGTGTGTTAATATGGGT |
| 1364 | Encoding | TTAATATGGGTAGTTGGGAACACAAACAGGATGTCC |
| | Probe 1317 | CATCCGATGTGGGTGTGTTAATATGGGT |
| 1365 | Encoding | TTAATATGGGTAGTTGGGCTAATCTTTGGTACAAAC |
| | Probe 1318 | AGGAACAGGGTGTGTTAATATGGGT |
| 1366 | Encoding | TTAATATGGGTAGTTGGGTGAGGAGTTGCAGTTTTG |
| | Probe 1319 | AGTGGCTGGGTGTGTTAATATGGGT |
| 1367 | Encoding | TTAATATGGGTAGTTGGGTGAAGAGTTGCAGTTTTG |
| | Probe 1320 | AGTGGCTGGGTGTGTTAATATGGGT |
| 1368 | Encoding | AGTATTATTAGGGTGAGGGAAGTACAAACAGGATGT |
| | Probe 1321 | CCCATCCGATGTGGGTTGGAGTATTATTAG |
| 1369 | Encoding | AGTATTATTAGGGTGAGGTAGTGGTACAAACAGGAT |
| | Probe 1322 | GTCCGTAGGGTTGGAGTATTATTAG |
| 1370 | Encoding | AGTATTATTAGGGTGAGGTAGTGGTACAAACAGGAT |
| | Probe 1323 | GTCGGTGGGTTGGAGTATTATTAG |
| 1371 | Encoding | AGTATTATTAGGGTGAGGAAATACAAACAGGATGTC |
| | Probe 1324 | CCATCCGATGTGGGTTGGAGTATTATTAG |
| 1372 | Encoding | AGTATTATTAGGGTGAGGAACACAAACAGGATGTCC |
| | Probe 1325 | CATCCGATGTGGGTTGGAGTATTATTAG |
| 1373 | Encoding | AGTATTATTAGGGTGAGGCTAATCTTTGGTACAAAC |
| | Probe 1326 | AGGAACAGGGTTGGAGTATTATTAG |
| 1374 | Encoding | AGTATTATTAGGGTGAGGGAGGAGTTGCAGTTTTGA |
| | Probe 1327 | GTGGCTGGGTTGGAGTATTATTAG |
| 1375 | Encoding | AGTATTATTAGGGTGAGGTGAAGAGTTGCAGTTTTG |
| | Probe 1328 | AGTGGCTGGGTTGGAGTATTATTAG |
| 1376 | Encoding | GGAATTTAGTGAGAAGGGTGGAACTTCACTCAAGAA |
| | Probe 1329 | CAGCTCAGGGTGTTGGAATTTAGTG |
| 1377 | Encoding | GGAATTTAGTGAGAAGGGCGATCTCTAAGCTCTTCT |
| | Probe 1330 | TGGGATGTGTTGGGTGTTGGAATTTAGTG |
| 1378 | Encoding | GGAATTTAGTGAGAAGGGCAACTCTGCTTCGCAGCT |
| | Probe 1331 | TTGGAAGGGTGTTGGAATTTAGTG |
| 1379 | Encoding | GGAATTTAGTGAGAAGGGTTTGGTCAGCCCCCCCCA |
| | Probe 1332 | CACGATGGGTGTTGGAATTTAGTG |
| 1380 | Encoding | GGAATTTAGTGAGAAGGGAGCGGCGCCCTCCTAAAA |
| | Probe 1333 | GGTATCGGGTGTTGGAATTTAGTG |
| 1381 | Encoding | GGAATTTAGTGAGAAGGGAATGTCCCTTAAGACAGA |
| | Probe 1334 | GGTAATGGGTGTTGGAATTTAGTG |
| 1382 | Encoding | GGAATTTAGTGAGAAGGGCCGTTCTACCTCTCAGTA |
| | Probe 1335 | CGGGATGGGTGTTGGAATTTAGTG |
| 1383 | Encoding | GGAATTTAGTGAGAAGGGAGGCACTAACTTGAGAG |
| | Probe 1336 | AGCATCGTGGGTGTTGGAATTTAGTG |
| 1384 | Encoding | ATGTATTAAGAGGAGGGAGGAACTTCACTCAAGAAC |
| | Probe 1337 | AGCTCAGAGGAGGATGTATTAAGA |
| 1385 | Encoding | ATGTATTAAGAGGAGGGACGATCTCTAAGCTCTTCT |
| | Probe 1338 | TGGGATGTGTTGAGGAGGATGTATTAAGA |
| 1386 | Encoding | ATGTATTAAGAGGAGGGACAACTCTGCTTCGCAGCT |
| | Probe 1339 | TTGGAAGAGGAGGATGTATTAAGA |
| 1387 | Encoding | ATGTATTAAGAGGAGGGATTTGGTCAGCCCCCCCCA |
| | Probe 1340 | CACGATGAGGAGGATGTATTAAGA |
| 1388 | Encoding | ATGTATTAAGAGGAGGGAAGCGGCGCCCTCCTAAAA |
| | Probe 1341 | GGTATCGAGGAGGATGTATTAAGA |
| 1389 | Encoding | ATGTATTAAGAGGAGGGAAATGTCCCTTAAGACAGA |
| | Probe 1342 | GGTAATGAGGAGGATGTATTAAGA |
| 1390 | Encoding | ATGTATTAAGAGGAGGGACCGTTCTACCTCTCAGTA |
| | Probe 1343 | CGGGATGAGGAGGATGTATTAAGA |
| 1391 | Encoding | ATGTATTAAGAGGAGGGAAGGCACTAACTTGAGAG |
| | Probe 1344 | AGCATCGGAGGAGGATGTATTAAGA |
| 1392 | Encoding | ATAAGATAGTGAGATGGGTGCGCATTGCTGGGTAAG |
| | Probe 1345 | AGTAAGGTGGGTGATAAGATAGTG |
| 1393 | Encoding | ATAAGATAGTGAGATGGGTCACTAACTTAATATTGG |
| | Probe 1346 | CAACTAGTATAGTGGGTGATAAGATAGTG |
| 1394 | Encoding | ATAAGATAGTGAGATGGGTGAAACCGTATTAGCACA |
| | Probe 1347 | AATTTCAGAGTGGGTGATAAGATAGTG |
| 1395 | Encoding | ATAAGATAGTGAGATGGGCAGATACCGTATTAGCAC |
| | Probe 1348 | AAATTTGAGGTGGGTGATAAGATAGTG |
| 1396 | Encoding | ATAAGATAGTGAGATGGGTGCAGCTTCGGCGCAGAA |
| | Probe 1349 | GGAGAGCGTGGGTGATAAGATAGTG |
| 1397 | Encoding | ATAAGATAGTGAGATGGGAATTTCGGCGCAGAAGG |
| | Probe 1350 | AGTCCTAGTGGGTGATAAGATAGTG |
| 1398 | Encoding | ATAAGATAGTGAGATGGGTGCGCATTGCTGGGTAAG |
| | Probe 1351 | AGTTAGGGTGGGTGATAAGATAGTG |
| 1399 | Encoding | ATAAGATAGTGAGATGGGATCATTCCACTTTCCTCT |
| | Probe 1352 | ACTGGTGGTGGGTGATAAGATAGTG |
| 1400 | Encoding | ATGTATTAAGAGGAGGGATGCGCATTGCTGGGTAAG |
| | Probe 1353 | AGTAAGGAGGAGGATGTATTAAGA |
| 1401 | Encoding | ATGTATTAAGAGGAGGGATCACTAACTTAATATTGG |
| | Probe 1354 | CAACTAGTATAGAGGAGGATGTATTAAGA |
| 1402 | Encoding | ATGTATTAAGAGGAGGGAGAAACCGTATTAGCACA |
| | Probe 1355 | AATTTCAGAGAGGAGGATGTATTAAGA |
| 1403 | Encoding | ATGTATTAAGAGGAGGGACAGATACCGTATTAGCAC |
| | Probe 1356 | AAATTTGAGGAGGAGGATGTATTAAGA |
| 1404 | Encoding | ATGTATTAAGAGGAGGGAGCAGCTTCGGCGCAGAA |
| | Probe 1357 | GGAGAGCGAGGAGGATGTATTAAGA |
| 1405 | Encoding | ATGTATTAAGAGGAGGGAAATTTCGGCGCAGAAGG |
| | Probe 1358 | AGTCCTAGAGGAGGATGTATTAAGA |
| 1406 | Encoding | ATGTATTAAGAGGAGGGAGCGCATTGCTGGGTAAGA |
| | Probe 1359 | GTTAGGGAGGAGGATGTATTAAGA |
| 1407 | Encoding | ATGTATTAAGAGGAGGGAATCATTCCACTTTCCTCT |
| | Probe 1360 | ACTGGTGGAGGAGGATGTATTAAGA |
| 1408 | Encoding | TTAATATGGGTAGTTGGGATCTCAATTTCTTGACGTT |
| | Probe 1361 | ATCCGAGTGGGTGTGTTAATATGGGT |
| 1409 | Encoding | TTAATATGGGTAGTTGGGCAATTATGCGGTTCCTGG |
| | Probe 1362 | GTTGTCGTGGGTGTGTTAATATGGGT |
| 1410 | Encoding | TTAATATGGGTAGTTGGGCTTAACTCCGCTTTACACG |
| | Probe 1363 | GCCACAGGGTGTGTTAATATGGGT |
| 1411 | Encoding | TTAATATGGGTAGTTGGGTGTTAGCGCTCATCGTTTA |
| | Probe 1364 | CACGCGGGTGTGTTAATATGGGT |
| 1412 | Encoding | TTAATATGGGTAGTTGGGTGGCACTTCCTTCTTCCCT |
| | Probe 1365 | GCACTGGGTGTGTTAATATGGGT |
| 1413 | Encoding | TTAATATGGGTAGTTGGGTGGCAATTCCTTGCCGAC |
| | Probe 1366 | ACCATCGGGTGTGTTAATATGGGT |
| 1414 | Encoding | TTAATATGGGTAGTTGGGCAACTTCACTCTGTTTCAG |
| | Probe 1367 | CCTAAGGGTGTGTTAATATGGGT |
| 1415 | Encoding | TTAATATGGGTAGTTGGGAACGATAAATCTTTTCTCT |
| | Probe 1368 | CGCCACGTACGGGTGTGTTAATATGGGT |
| 1416 | Encoding | ATGTATTAAGAGGAGGGAATCTCAATTTCTTGACGT |
| | Probe 1369 | TATCCGAGGAGGAGGATGTATTAAGA |
| 1417 | Encoding | ATGTATTAAGAGGAGGGACAATTATGCGGTTCCTGG |
| | Probe 1370 | GTTGTCGGAGGAGGATGTATTAAGA |
| 1418 | Encoding | ATGTATTAAGAGGAGGGACTTAACTCCGCTTTACAC |
| | Probe 1371 | GGCCACAGAGGAGGATGTATTAAGA |
| 1419 | Encoding | ATGTATTAAGAGGAGGGATGTTAGCGCTCATCGTTT |
| | Probe 1372 | ACACGCGAGGAGGATGTATTAAGA |
| 1420 | Encoding | ATGTATTAAGAGGAGGGATGGCACTTCCTTCTTCCCT |
| | Probe 1373 | GCACTGAGGAGGATGTATTAAGA |
| 1421 | Encoding | ATGTATTAAGAGGAGGGATGGCAATTCCTTGCCGAC |
| | Probe 1374 | ACCATCGAGGAGGATGTATTAAGA |
| 1422 | Encoding | ATGTATTAAGAGGAGGGACAACTTCACTCTGTTTCA |
| | Probe 1375 | GCCTAAGAGGAGGATGTATTAAGA |
| 1423 | Encoding | ATGTATTAAGAGGAGGGAAACGATAAATCTTTTCTC |
| | Probe 1376 | TCGCCACGTACGAGGAGGATGTATTAAGA |
| 1424 | Encoding | GGTAATTGAGTAGAAGGGCGGTAAATCTTTTCACAC |
| | Probe 1377 | CATGCGTAGGGATGAGGTAATTGAGT |
| 1425 | Encoding | GGTAATTGAGTAGAAGGGTGCCCCGAAGGATTGTTT |
| | Probe 1378 | TACTACGGGATGAGGTAATTGAGT |
| 1426 | Encoding | GGTAATTGAGTAGAAGGGTGACCCGTAGGAAAAGA |
| | Probe 1379 | CACATTACACAGGGATGAGGTAATTGAGT |
| 1427 | Encoding | GGTAATTGAGTAGAAGGGCGGACAGCTCTGCTTCCC |
| | Probe 1380 | TTTCAAGGGATGAGGTAATTGAGT |
| 1428 | Encoding | GGTAATTGAGTAGAAGGGTGGAGAGTTATCCTCGGC |
| | Probe 1381 | TGTCGGAGGGATGAGGTAATTGAGT |
| 1429 | Encoding | GGTAATTGAGTAGAAGGGACGATAAATCTTTTCACA |
| | Probe 1382 | CCATGCGTAGGGATGAGGTAATTGAGT |
| 1430 | Encoding | GGTAATTGAGTAGAAGGGTGCCCCGAAGGATTGTTT |
| | Probe 1383 | TACAACGTGGGATGAGGTAATTGAGT |
| 1431 | Encoding | GGTAATTGAGTAGAAGGGACACGTAGGAAAAGACA |
| | Probe 1384 | CATTACACAGGGATGAGGTAATTGAGT |
| 1432 | Encoding | ATGTATTAAGAGGAGGGACGGTAAATCTTTTCACAC |
| | Probe 1385 | CATGCGTAGAGGAGGATGTATTAAGA |
| 1433 | Encoding | ATGTATTAAGAGGAGGGATGCCCCGAAGGATTGTTT |
| | Probe 1386 | TACTACGAGGAGGATGTATTAAGA |
| 1434 | Encoding | ATGTATTAAGAGGAGGGAGACCCGTAGGAAAAGAC |
| | Probe 1387 | ACATTACACAGAGGAGGATGTATTAAGA |
| 1435 | Encoding | ATGTATTAAGAGGAGGGACGGACAGCTCTGCTTCCC |
| | Probe 1388 | TTTCAAGAGGAGGATGTATTAAGA |
| 1436 | Encoding | ATGTATTAAGAGGAGGGAGGAGAGTTATCCTCGGCT |
| | Probe 1389 | GTCGGAGAGGAGGATGTATTAAGA |
| 1437 | Encoding | ATGTATTAAGAGGAGGGAACGATAAATCTTTTCACA |
| | Probe 1390 | CCATGCGTAGAGGAGGATGTATTAAGA |
| 1438 | Encoding | ATGTATTAAGAGGAGGGATGCCCCGAAGGATTGTTT |
| | Probe 1391 | TACAACGGAGGAGGATGTATTAAGA |
| 1439 | Encoding | ATGTATTAAGAGGAGGGAACACGTAGGAAAAGACA |
| | Probe 1392 | CATTACACAGAGGAGGATGTATTAAGA |
| 1440 | Encoding | GTAATAGATATGAGGGTGTTTCATGCGACTTAGTTG |
| | Probe 1393 | CATATATGGGAGGGTAATAGATAT |
| 1441 | Encoding | GTAATAGATATGAGGGTGTCGTGCGACTTAGTTGCA |
| | Probe 1394 | TTAACGTGGGAGGGTAATAGATAT |
| 1442 | Encoding | GTAATAGATATGAGGGTGGCGTTTTGCCTCTCTTTGT |
| | Probe 1395 | TGTGGTGGGAGGGTAATAGATAT |
| 1443 | Encoding | GTAATAGATATGAGGGTGTTCATGCGACTTAGTTGC |
| | Probe 1396 | ATTTACTGGGAGGGTAATAGATAT |
| 1444 | Encoding | GTAATAGATATGAGGGTGAGCGTTTTGCCTCTCTTTG |
| | Probe 1397 | TTGTGGTGGGAGGGTAATAGATAT |
| 1445 | Encoding | GTAATAGATATGAGGGTGAGCGTTTTGCCTCTCTTTG |
| | Probe 1398 | TTCTGTGGGAGGGTAATAGATAT |
| 1446 | Encoding | GTAATAGATATGAGGGTGGAGGGTTTTGCCTCTCTTT |
| | Probe 1399 | GTACTTGGGAGGGTAATAGATAT |
| 1447 | Encoding | GTAATAGATATGAGGGTGGTTCCATGCGACTTAGTT |
| | Probe 1400 | GCAAATTGGGAGGGTAATAGATAT |
| 1448 | Encoding | TAGAATTAGAGAGATGGGTTTCATGCGACTTAGTTG |
| | Probe 1401 | CATATAGGTGGAGTAGAATTAGAG |
| 1449 | Encoding | TAGAATTAGAGAGATGGGTCGTGCGACTTAGTTGCA |
| | Probe 1402 | TTAACGGGTGGAGTAGAATTAGAG |
| 1450 | Encoding | TAGAATTAGAGAGATGGGTGCGTTTTGCCTCTCTTTG |
| | Probe 1403 | TTGTGGTGGTGGAGTAGAATTAGAG |
| 1451 | Encoding | TAGAATTAGAGAGATGGGTTCATGCGACTTAGTTGC |
| | Probe 1404 | ATTTACGGTGGAGTAGAATTAGAG |
| 1452 | Encoding | TAGAATTAGAGAGATGGGAGCGTTTTGCCTCTCTTT |
| | Probe 1405 | GTTGTGGTGGTGGAGTAGAATTAGAG |
| 1453 | Encoding | TAGAATTAGAGAGATGGGAGCGTTTTGCCTCTCTTT |
| | Probe 1406 | GTTCTGGGTGGAGTAGAATTAGAG |
| 1454 | Encoding | TAGAATTAGAGAGATGGGTGAGGGTTTTGCCTCTCT |
| | Probe 1407 | TTGTACTGGTGGAGTAGAATTAGAG |
| 1455 | Encoding | TAGAATTAGAGAGATGGGTGTTCCATGCGACTTAGT |
| | Probe 1408 | TGCAAATGGTGGAGTAGAATTAGAG |
| 1456 | Encoding | GGAATTTAGTGAGAAGGGTGGTAGAATAGGAATCA |
| | Probe 1409 | CTAGGTTTCTAGTGGGTGTTGGAATTTAGTG |
| 1457 | Encoding | GGAATTTAGTGAGAAGGGCGGTAGAATAGGAATCA |
| | Probe 1410 | CTAGGTTTCTAGTGGGTGTTGGAATTTAGTG |
| 1458 | Encoding | GGAATTTAGTGAGAAGGGTGGCACTAGAATAGGAA |
| | Probe 1411 | TCACTAGGTAAGTGGGTGTTGGAATTTAGTG |
| 1459 | Encoding | GGAATTTAGTGAGAAGGGTGGCACTAGAATAGGAA |
| | Probe 1412 | TCACTAGGAAAGGGTGTTGGAATTTAGTG |
| 1460 | Encoding | GGAATTTAGTGAGAAGGGCAGCCACTAGAATAGGA |
| | Probe 1413 | ATCACTTCCGGGTGTTGGAATTTAGTG |
| 1461 | Encoding | GGAATTTAGTGAGAAGGGTGCAGCCACTAGAATAG |
| | Probe 1414 | GAATCAGATGGGTGTTGGAATTTAGTG |
| 1462 | Encoding | GGAATTTAGTGAGAAGGGTGCGCTAGAATAGGAATC |
| | Probe 1415 | ACTAGGTAAGTGGGTGTTGGAATTTAGTG |
| 1463 | Encoding | GGAATTTAGTGAGAAGGGTGGTAGAATAGGAATCA |
| | Probe 1416 | CTAGGTTTCAAGGTGGGTGTTGGAATTTAGTG |
| 1464 | Encoding | TAGAATTAGAGAGATGGGTGGTAGAATAGGAATCA |
| | Probe 1417 | CTAGGTTTCTAGGGTGGAGTAGAATTAGAG |
| 1465 | Encoding | TAGAATTAGAGAGATGGGCGGTAGAATAGGAATCA |
| | Probe 1418 | CTAGGTTTCTAGGGTGGAGTAGAATTAGAG |
| 1466 | Encoding | TAGAATTAGAGAGATGGGTGGCACTAGAATAGGAA |
| | Probe 1419 | TCACTAGGTAAGGGTGGAGTAGAATTAGAG |
| 1467 | Encoding | TAGAATTAGAGAGATGGGTGGCACTAGAATAGGAA |
| | Probe 1420 | TCACTAGGAAAGGTGGAGTAGAATTAGAG |
| 1468 | Encoding | TAGAATTAGAGAGATGGGCAGCCACTAGAATAGGA |
| | Probe 1421 | ATCACTTCCGGTGGAGTAGAATTAGAG |
| 1469 | Encoding | TAGAATTAGAGAGATGGGTGCAGCCACTAGAATAG |
| | Probe 1422 | GAATCAGATGGTGGAGTAGAATTAGAG |
| 1470 | Encoding | TAGAATTAGAGAGATGGGTGCGCTAGAATAGGAATC |
| | Probe 1423 | ACTAGGTAAGGGTGGAGTAGAATTAGAG |
| 1471 | Encoding | TAGAATTAGAGAGATGGGTGGTAGAATAGGAATCA |
| | Probe 1424 | CTAGGTTTCAAGGTGGTGGAGTAGAATTAGAG |
| 1472 | Encoding | ATAAGATAGTGAGATGGGAGGTAGGAAGGGCGACA |
| | Probe 1425 | TTACAGCGTGGGTGATAAGATAGTG |
| 1473 | Encoding | ATAAGATAGTGAGATGGGTCACCAAAGCAGTCCACA |
| | Probe 1426 | GGTTCTCGTGGGTGATAAGATAGTG |
| 1474 | Encoding | ATAAGATAGTGAGATGGGAGTCAAATCACTTCTCCT |
| | Probe 1427 | CCCCTTGTGGGTGATAAGATAGTG |
| 1475 | Encoding | ATAAGATAGTGAGATGGGCGACTCCGGTTAGGGTTG |
| | Probe 1428 | GGTGTGGTGGGTGATAAGATAGTG |
| 1476 | Encoding | ATAAGATAGTGAGATGGGCACCATCCTTGATGCTGG |
| | Probe 1429 | CTAGACGTGGGTGATAAGATAGTG |
| 1477 | Encoding | ATAAGATAGTGAGATGGGCAACAAAGCAGTCCACA |
| | Probe 1430 | GGTTCTCGTGGGTGATAAGATAGTG |
| 1478 | Encoding | ATAAGATAGTGAGATGGGAGGCGCTCAGTCAAATCA |
| | Probe 1431 | CTTGAGGTGGGTGATAAGATAGTG |
| 1479 | Encoding | ATAAGATAGTGAGATGGGCAGGTAGGAAGGGCGAC |
| | Probe 1432 | ATTAGAGGTGGGTGATAAGATAGTG |
| 1480 | Encoding | TAGAATTAGAGAGATGGGAGGTAGGAAGGGCGACA |
| | Probe 1433 | TTACAGCGGTGGAGTAGAATTAGAG |
| 1481 | Encoding | TAGAATTAGAGAGATGGGTCACCAAAGCAGTCCACA |
| | Probe 1434 | GGTTCTCGGTGGAGTAGAATTAGAG |
| 1482 | Encoding | TAGAATTAGAGAGATGGGAGTCAAATCACTTCTCCT |
| | Probe 1435 | CCCCTTGGTGGAGTAGAATTAGAG |
| 1483 | Encoding | TAGAATTAGAGAGATGGGCGACTCCGGTTAGGGTTG |
| | Probe 1436 | GGTGTGGGTGGAGTAGAATTAGAG |
| 1484 | Encoding | TAGAATTAGAGAGATGGGCACCATCCTTGATGCTGG |
| | Probe 1437 | CTAGACGGTGGAGTAGAATTAGAG |
| 1485 | Encoding | TAGAATTAGAGAGATGGGCAACAAAGCAGTCCACA |
| | Probe 1438 | GGTTCTCGGTGGAGTAGAATTAGAG |
| 1486 | Encoding | TAGAATTAGAGAGATGGGAGGCGCTCAGTCAAATCA |
| | Probe 1439 | CTTGAGGGTGGAGTAGAATTAGAG |
| 1487 | Encoding | TAGAATTAGAGAGATGGGCAGGTAGGAAGGGCGAC |
| | Probe 1440 | ATTAGAGGGTGGAGTAGAATTAGAG |
| 1488 | Encoding | TTAATATGGGTAGTTGGGCAGGCGACTTCGTGGTCT |
| | Probe 1441 | TATGGCCGGGTGTGTTAATATGGGT |
| 1489 | Encoding | TTAATATGGGTAGTTGGGTGCGGAGCTTTTACCCCA |
| | Probe 1442 | AAGTCTACGGGTGTGTTAATATGGGT |
| 1490 | Encoding | TTAATATGGGTAGTTGGGTGGCGGAGCTTTTACCCC |
| | Probe 1443 | AAAGTGTAGGGTGTGTTAATATGGGT |
| 1491 | Encoding | TTAATATGGGTAGTTGGGTGGAAGTCATGCGACTTC |
| | Probe 1444 | GTGGAGAGGGTGTGTTAATATGGGT |
| 1492 | Encoding | TTAATATGGGTAGTTGGGTGGAAAGTCATGCGACTT |
| | Probe 1445 | CGTGCAGTGGGTGTGTTAATATGGGT |
| 1493 | Encoding | TTAATATGGGTAGTTGGGTGCGGAGCTTTTACCCCA |
| | Probe 1446 | AAGTGTAGGGTGTGTTAATATGGGT |
| 1494 | Encoding | TTAATATGGGTAGTTGGGAGTCGACTTCGTGGTCTTA |
| | Probe 1447 | TGGCCGGGTGTGTTAATATGGGT |
| 1495 | Encoding | TTAATATGGGTAGTTGGGTGGCGGAGCTTTTACCCC |
| | Probe 1448 | AAAGAGTGGGTGTGTTAATATGGGT |
| 1496 | Encoding | TAGAATTAGAGAGATGGGCAGGCGACTTCGTGGTCT |
| | Probe 1449 | TATGGCCGGTGGAGTAGAATTAGAG |
| 1497 | Encoding | TAGAATTAGAGAGATGGGTGCGGAGCTTTTACCCCA |
| | Probe 1450 | AAGTCTACGGTGGAGTAGAATTAGAG |
| 1498 | Encoding | TAGAATTAGAGAGATGGGTGGCGGAGCTTTTACCCC |
| | Probe 1451 | AAAGTGTAGGTGGAGTAGAATTAGAG |
| 1499 | Encoding | TAGAATTAGAGAGATGGGTGGAAGTCATGCGACTTC |
| | Probe 1452 | GTGGAGAGGTGGAGTAGAATTAGAG |
| 1500 | Encoding | TAGAATTAGAGAGATGGGTGGAAAGTCATGCGACTT |
| | Probe 1453 | CGTGCAGGGTGGAGTAGAATTAGAG |
| 1501 | Encoding | TAGAATTAGAGAGATGGGTGCGGAGCTTTTACCCCA |
| | Probe 1454 | AAGTGTAGGTGGAGTAGAATTAGAG |
| 1502 | Encoding | TAGAATTAGAGAGATGGGAGTCGACTTCGTGGTCTT |
| | Probe 1455 | ATGGCCGGTGGAGTAGAATTAGAG |
| 1503 | Encoding | TAGAATTAGAGAGATGGGTGGCGGAGCTTTTACCCC |
| | Probe 1456 | AAAGAGTGGTGGAGTAGAATTAGAG |
| 1504 | Encoding | GGTAATTGAGTAGAAGGGACAGTTACAGTCTAGCAA |
| | Probe 1457 | CCCCGGTGGGATGAGGTAATTGAGT |
| 1505 | Encoding | GGTAATTGAGTAGAAGGGTGCACACTAGGAATTCCG |
| | Probe 1458 | GTTGAGGTGGGATGAGGTAATTGAGT |
| 1506 | Encoding | GGTAATTGAGTAGAAGGGCAAAGTAGTAGTTCCAAG |
| | Probe 1459 | GTTGTCGTGGGATGAGGTAATTGAGT |
| 1507 | Encoding | GGTAATTGAGTAGAAGGGACAGTTACAGTCTAGCAA |
| | Probe 1460 | CCCGGGAGGGATGAGGTAATTGAGT |
| 1508 | Encoding | GGTAATTGAGTAGAAGGGAACCCTTGGAGTTACGCT |
| | Probe 1461 | ACTTTGTGGGATGAGGTAATTGAGT |
| 1509 | Encoding | GGTAATTGAGTAGAAGGGCAGTTACAGTCTAGCAAC |
| | Probe 1462 | CCGGGAGGGATGAGGTAATTGAGT |
| 1510 | Encoding | GGTAATTGAGTAGAAGGGTGGTGTTGAGCCTTGGAG |
| | Probe 1463 | TTACCGAGGGATGAGGTAATTGAGT |
| 1511 | Encoding | GGTAATTGAGTAGAAGGGTGTTGTTTTAGTAGTAGT |
| | Probe 1464 | TCCAAGGAACGGGATGAGGTAATTGAGT |
| 1512 | Encoding | TAGAATTAGAGAGATGGGACAGTTACAGTCTAGCAA |
| | Probe 1465 | CCCCGGTGGTGGAGTAGAATTAGAG |
| 1513 | Encoding | TAGAATTAGAGAGATGGGTGCACACTAGGAATTCCG |
| | Probe 1466 | GTTGAGGTGGTGGAGTAGAATTAGAG |
| 1514 | Encoding | TAGAATTAGAGAGATGGGCAAAGTAGTAGTTCCAAG |
| | Probe 1467 | GTTGTCGGGTGGAGTAGAATTAGAG |
| 1515 | Encoding | TAGAATTAGAGAGATGGGACAGTTACAGTCTAGCAA |
| | Probe 1468 | CCCGGGAGGTGGAGTAGAATTAGAG |
| 1516 | Encoding | TAGAATTAGAGAGATGGGAACCCTTGGAGTTACGCT |
| | Probe 1469 | ACTTTGGGTGGAGTAGAATTAGAG |
| 1517 | Encoding | TAGAATTAGAGAGATGGGCAGTTACAGTCTAGCAAC |
| | Probe 1470 | CCGGGAGGTGGAGTAGAATTAGAG |
| 1518 | Encoding | TAGAATTAGAGAGATGGGTGGTGTTGAGCCTTGGAG |
| | Probe 1471 | TTACCGAGGTGGAGTAGAATTAGAG |
| 1519 | Encoding | TAGAATTAGAGAGATGGGTGTTGTTTTAGTAGTAGT |
| | Probe 1472 | TCCAAGGAACGGTGGAGTAGAATTAGAG |
| 1520 | Encoding | TGTATAGGATTAGAAGGGCGACTTGATAGGTACAGT |
| | Probe 1473 | CTTTTTTGAAGGGTGAGTGTATAGGATT |
| 1521 | Encoding | TGTATAGGATTAGAAGGGTGTGACTAGTTAATCAGG |
| | Probe 1474 | CGCATCCGGGTGAGTGTATAGGATT |
| 1522 | Encoding | TGTATAGGATTAGAAGGGTACCCGAAATACTATCTA |
| | Probe 1475 | CTTTCATACTAGGGTGAGTGTATAGGATT |
| 1523 | Encoding | TGTATAGGATTAGAAGGGAAGTTCTCTCTGTAATAG |
| | Probe 1476 | CCATTCATGGGTGAGTGTATAGGATT |
| 1524 | Encoding | TGTATAGGATTAGAAGGGTCGTCTTGATAGGTACAG |
| | Probe 1477 | TCTTTTTTGAAGGGTGAGTGTATAGGATT |
| 1525 | Encoding | TGTATAGGATTAGAAGGGCAAGCTTGACCTTGCGGT |
| | Probe 1478 | TTCCGAGGGTGAGTGTATAGGATT |
| 1526 | Encoding | TGTATAGGATTAGAAGGGCGCAGGCCATCTATTAGT |
| | Probe 1479 | GGAAACGGGTGAGTGTATAGGATT |
| 1527 | Encoding | TGTATAGGATTAGAAGGGCCGAAGGCCATCTATTAG |
| | Probe 1480 | TGGAAACGGGTGAGTGTATAGGATT |
| 1528 | Encoding | TATAGTTATGGAGAAGGGCGACTTGATAGGTACAGT |
| | Probe 1481 | CTTTTTTGAAGGAAGGGTATAGTTATGG |
| 1529 | Encoding | TATAGTTATGGAGAAGGGTGTGACTAGTTAATCAGG |
| | Probe 1482 | CGCATCCGGAAGGGTATAGTTATGG |
| 1530 | Encoding | TATAGTTATGGAGAAGGGTACCCGAAATACTATCTA |
| | Probe 1483 | CTTTCATACTAGGAAGGGTATAGTTATGG |
| 1531 | Encoding | TATAGTTATGGAGAAGGGAAGTTCTCTCTGTAATAG |
| | Probe 1484 | CCATTCATGGAAGGGTATAGTTATGG |
| 1532 | Encoding | TATAGTTATGGAGAAGGGTCGTCTTGATAGGTACAG |
| | Probe 1485 | TCTTTTTTGAAGGAAGGGTATAGTTATGG |
| 1533 | Encoding | TATAGTTATGGAGAAGGGCAAGCTTGACCTTGCGGT |
| | Probe 1486 | TTCCGAGGAAGGGTATAGTTATGG |
| 1534 | Encoding | TATAGTTATGGAGAAGGGCGCAGGCCATCTATTAGT |
| | Probe 1487 | GGAAACGGAAGGGTATAGTTATGG |
| 1535 | Encoding | TATAGTTATGGAGAAGGGCCGAAGGCCATCTATTAG |
| | Probe 1488 | TGGAAACGGAAGGGTATAGTTATGG |
| 1536 | Encoding | ATGGAAGTAGTAGAAGGGTAAACATCTGACTTGACA |
| | Probe 1489 | GACCCGGTGGGATGTATGGAAGTAGT |
| 1537 | Encoding | ATGGAAGTAGTAGAAGGGTGGACTCTACAAGACTCT |
| | Probe 1490 | AGCCTCGGTGGGATGTATGGAAGTAGT |
| 1538 | Encoding | ATGGAAGTAGTAGAAGGGATACCCTCTGTCAGGCAG |
| | Probe 1491 | ATCAGGTGGGATGTATGGAAGTAGT |
| 1539 | Encoding | ATGGAAGTAGTAGAAGGGTAGCCTCTGTCAGGCAGA |
| | Probe 1492 | TCCGGTGGGATGTATGGAAGTAGT |
| 1540 | Encoding | ATGGAAGTAGTAGAAGGGCCAATCTGACAGCGAGA |
| | Probe 1493 | GGCCGCTGGGATGTATGGAAGTAGT |
| 1541 | Encoding | ATGGAAGTAGTAGAAGGGTGCAATTGCTGAGGTTAT |
| | Probe 1494 | TAACCAGTGGGATGTATGGAAGTAGT |
| 1542 | Encoding | ATGGAAGTAGTAGAAGGGTCGCTCCTCAAGGGAAC |
| | Probe 1495 | AACCAGGTGGGATGTATGGAAGTAGT |
| 1543 | Encoding | ATGGAAGTAGTAGAAGGGTCCTCTCTGCCAAATTCC |
| | Probe 1496 | GTGCTAGGGATGTATGGAAGTAGT |
| 1544 | Encoding | TATAGTTATGGAGAAGGGTAAACATCTGACTTGACA |
| | Probe 1497 | GACCCGGTGGAAGGGTATAGTTATGG |
| 1545 | Encoding | TATAGTTATGGAGAAGGGTGGACTCTACAAGACTCT |
| | Probe 1498 | AGCCTCGGTGGAAGGGTATAGTTATGG |
| 1546 | Encoding | TATAGTTATGGAGAAGGGATACCCTCTGTCAGGCAG |
| | Probe 1499 | ATCAGGTGGAAGGGTATAGTTATGG |
| 1547 | Encoding | TATAGTTATGGAGAAGGGTAGCCTCTGTCAGGCAGA |
| | Probe 1500 | TCCGGTGGAAGGGTATAGTTATGG |
| 1548 | Encoding | TATAGTTATGGAGAAGGGCCAATCTGACAGCGAGAG |
| | Probe 1501 | GCCGCTGGAAGGGTATAGTTATGG |
| 1549 | Encoding | TATAGTTATGGAGAAGGGTGCAATTGCTGAGGTTAT |
| | Probe 1502 | TAACCAGTGGAAGGGTATAGTTATGG |
| 1550 | Encoding | TATAGTTATGGAGAAGGGTCGCTCCTCAAGGGAACA |
| | Probe 1503 | ACCAGGTGGAAGGGTATAGTTATGG |
| 1551 | Encoding | TATAGTTATGGAGAAGGGTCCTCTCTGCCAAATTCC |
| | Probe 1504 | GTGCTAGGAAGGGTATAGTTATGG |
| 1552 | Encoding | GGATAGAGTATAGTTGGGTTCCTGACGGCTTTACCC |
| | Probe 1505 | ATCATAGTGGATGGAGGATAGAGTAT |
| 1553 | Encoding | GGATAGAGTATAGTTGGGTCCTGACGGCTTTACCCA |
| | Probe 1506 | TCATAGTGGATGGAGGATAGAGTAT |
| 1554 | Encoding | GGATAGAGTATAGTTGGGAGGAAGGCCTGACGGCTT |
| | Probe 1507 | TACGGTGGATGGAGGATAGAGTAT |
| 1555 | Encoding | GGATAGAGTATAGTTGGGTTCCTGACGGCTTTACCC |
| | Probe 1508 | ATCAAAGGGATGGAGGATAGAGTAT |
| 1556 | Encoding | GGATAGAGTATAGTTGGGCCGGACGGCTTTACCCAT |
| | Probe 1509 | CATAGTGGATGGAGGATAGAGTAT |
| 1557 | Encoding | GGATAGAGTATAGTTGGGCAGGAAGGCCTGACGGCT |
| | Probe 1510 | TTAAGGTGGATGGAGGATAGAGTAT |
| 1558 | Encoding | GGATAGAGTATAGTTGGGTTCCTGACGGCTTTACCC |
| | Probe 1511 | ATCTAAGGATGGAGGATAGAGTAT |
| 1559 | Encoding | GGATAGAGTATAGTTGGGTCCTGACGGCTTTACCCA |
| | Probe 1512 | TCAAAGGGATGGAGGATAGAGTAT |
| 1560 | Encoding | TATAGTTATGGAGAAGGGTTCCTGACGGCTTTACCC |
| | Probe 1513 | ATCATAGTGGAAGGGTATAGTTATGG |
| 1561 | Encoding | TATAGTTATGGAGAAGGGTCCTGACGGCTTTACCCA |
| | Probe 1514 | TCATAGTGGAAGGGTATAGTTATGG |
| 1562 | Encoding | TATAGTTATGGAGAAGGGAGGAAGGCCTGACGGCTT |
| | Probe 1515 | TACGGTGGAAGGGTATAGTTATGG |
| 1563 | Encoding | TATAGTTATGGAGAAGGGTTCCTGACGGCTTTACCC |
| | Probe 1516 | ATCAAAGGGAAGGGTATAGTTATGG |
| 1564 | Encoding | TATAGTTATGGAGAAGGGCCGGACGGCTTTACCCAT |
| | Probe 1517 | CATAGTGGAAGGGTATAGTTATGG |
| 1565 | Encoding | TATAGTTATGGAGAAGGGCAGGAAGGCCTGACGGCT |
| | Probe 1518 | TTAAGGTGGAAGGGTATAGTTATGG |
| 1566 | Encoding | TATAGTTATGGAGAAGGGTTCCTGACGGCTTTACCC |
| | Probe 1519 | ATCTAAGGAAGGGTATAGTTATGG |
| 1567 | Encoding | TATAGTTATGGAGAAGGGTCCTGACGGCTTTACCCA |
| | Probe 1520 | TCAAAGGGAAGGGTATAGTTATGG |
| 1568 | Encoding | AATGATATGTTGAGTGGGAGCCCTGTCCACAGAGGT |
| | Probe 1521 | TTAGTTGTGGTGGAATGATATGTT |
| 1569 | Encoding | AATGATATGTTGAGTGGGAGGCACTGTTCGAGTGGA |
| | Probe 1522 | ACATCAGTGGTGGAATGATATGTT |
| 1570 | Encoding | AATGATATGTTGAGTGGGTCGATTTCTCCTTTGATAA |
| | Probe 1523 | CAGAATCTACGTGGTGGAATGATATGTT |
| 1571 | Encoding | AATGATATGTTGAGTGGGTGGTCTTCGTGTCTCCGA |
| | Probe 1524 | AGACTCGTGGTGGAATGATATGTT |
| 1572 | Encoding | AATGATATGTTGAGTGGGAGGCACGGAAGGGTTCAT |
| | Probe 1525 | CCCAGGGTGGTGGAATGATATGTT |
| 1573 | Encoding | AATGATATGTTGAGTGGGAGGCACTGTTCGAGTGGA |
| | Probe 1526 | ACAAGTAGGGTGGTGGAATGATATGTT |
| 1574 | Encoding | AATGATATGTTGAGTGGGTAACCGTAGTATGCTGAC |
| | Probe 1527 | CTAGCTGTGGTGGAATGATATGTT |
| 1575 | Encoding | AATGATATGTTGAGTGGGTTTCAGTTTCAAAAGCAG |
| | Probe 1528 | GTTTACGTGGTGGAATGATATGTT |
| 1576 | Encoding | GATAAGTAAGTAGGGATGAGCCCTGTCCACAGAGGT |
| | Probe 1529 | TTAGTTGGTGGAGGATAAGTAAGT |
| 1577 | Encoding | GATAAGTAAGTAGGGATGAGGCACTGTTCGAGTGGA |
| | Probe 1530 | ACATCAGGTGGAGGATAAGTAAGT |
| 1578 | Encoding | GATAAGTAAGTAGGGATGTCGATTTCTCCTTTGATA |
| | Probe 1531 | ACAGAATCTACGGTGGAGGATAAGTAAGT |
| 1579 | Encoding | GATAAGTAAGTAGGGATGTGGTCTTCGTGTCTCCGA |
| | Probe 1532 | AGACTCGGTGGAGGATAAGTAAGT |
| 1580 | Encoding | GATAAGTAAGTAGGGATGAGGCACGGAAGGGTTCA |
| | Probe 1533 | TCCCAGGTGGTGGAGGATAAGTAAGT |
| 1581 | Encoding | GATAAGTAAGTAGGGATGAGGCACTGTTCGAGTGGA |
| | Probe 1534 | ACAAGTAGGTGGTGGAGGATAAGTAAGT |
| 1582 | Encoding | GATAAGTAAGTAGGGATGTAACCGTAGTATGCTGAC |
| | Probe 1535 | CTAGCTGGTGGAGGATAAGTAAGT |
| 1583 | Encoding | GATAAGTAAGTAGGGATGTTTCAGTTTCAAAAGCAG |
| | Probe 1536 | GTTTACGGTGGAGGATAAGTAAGT |
| 1584 | Encoding | ATGGAAGTAGTAGAAGGGACGTGGTCCGTAGACATT |
| | Probe 1537 | ATGCCCAGGGATGTATGGAAGTAGT |
| 1585 | Encoding | ATGGAAGTAGTAGAAGGGTACTTCATCCGATAGTGC |
| | Probe 1538 | AAGCAGTGGGATGTATGGAAGTAGT |
| 1586 | Encoding | ATGGAAGTAGTAGAAGGGATGCCCTAAGGCCTTCTT |
| | Probe 1539 | CATAGTGTGGGATGTATGGAAGTAGT |
| 1587 | Encoding | ATGGAAGTAGTAGAAGGGAAACATCTGACTTAATTG |
| | Probe 1540 | ACCGGGAGGGATGTATGGAAGTAGT |
| 1588 | Encoding | ATGGAAGTAGTAGAAGGGTGCCCAAGACCACAACC |
| | Probe 1541 | TCTAAATCCTGTGGGATGTATGGAAGTAGT |
| 1589 | Encoding | ATGGAAGTAGTAGAAGGGTGAGCTATCTCTAAAGGA |
| | Probe 1542 | TTCGCTCCTGGGATGTATGGAAGTAGT |
| 1590 | Encoding | ATGGAAGTAGTAGAAGGGCGTTGTCTCAGCGTTCCC |
| | Probe 1543 | GAACCGTGGGATGTATGGAAGTAGT |
| 1591 | Encoding | ATGGAAGTAGTAGAAGGGTGCCTACGACAGACTTTA |
| | Probe 1544 | TGAGTTGGCGGGATGTATGGAAGTAGT |
| 1592 | Encoding | GATAAGTAAGTAGGGATGACGTGGTCCGTAGACATT |
| | Probe 1545 | ATGCCCAGGTGGAGGATAAGTAAGT |
| 1593 | Encoding | GATAAGTAAGTAGGGATGTACTTCATCCGATAGTGC |
| | Probe 1546 | AAGCAGGGTGGAGGATAAGTAAGT |
| 1594 | Encoding | GATAAGTAAGTAGGGATGATGCCCTAAGGCCTTCTT |
| | Probe 1547 | CATAGTGGGTGGAGGATAAGTAAGT |
| 1595 | Encoding | GATAAGTAAGTAGGGATGAAACATCTGACTTAATTG |
| | Probe 1548 | ACCGGGAGGTGGAGGATAAGTAAGT |
| 1596 | Encoding | GATAAGTAAGTAGGGATGGCCCAAGACCACAACCTC |
| | Probe 1549 | TAAATCCTGGGTGGAGGATAAGTAAGT |
| 1597 | Encoding | GATAAGTAAGTAGGGATGGAGCTATCTCTAAAGGAT |
| | Probe 1550 | TCGCTCCTGGTGGAGGATAAGTAAGT |
| 1598 | Encoding | GATAAGTAAGTAGGGATGCGTTGTCTCAGCGTTCCC |
| | Probe 1551 | GAACCGGGTGGAGGATAAGTAAGT |
| 1599 | Encoding | GATAAGTAAGTAGGGATGGCCTACGACAGACTTTAT |
| | Probe 1552 | GAGTTGGCGGTGGAGGATAAGTAAGT |
| 1600 | Encoding | GGATAGAGTATAGTTGGGTGGAAGGGAACAGGGCG |
| | Probe 1553 | TTGCCGGAGGATGGAGGATAGAGTAT |
| 1601 | Encoding | GGATAGAGTATAGTTGGGTGGAAAGGGAACAGGGC |
| | Probe 1554 | GTTGCAGGTGGATGGAGGATAGAGTAT |
| 1602 | Encoding | GGATAGAGTATAGTTGGGCGAGAAGGGAACAGGGC |
| | Probe 1555 | GTTGAGGTGGATGGAGGATAGAGTAT |
| 1603 | Encoding | GGATAGAGTATAGTTGGGTTCAACAGGGCGTTGCCC |
| | Probe 1556 | CTGGCAGGATGGAGGATAGAGTAT |
| 1604 | Encoding | GGATAGAGTATAGTTGGGTGCGCGAAGGGAACAGG |
| | Probe 1557 | GCGTTCGGTGGATGGAGGATAGAGTAT |
| 1605 | Encoding | GGATAGAGTATAGTTGGGCTTGAACAGGGCGTTGCC |
| | Probe 1558 | CCTCGCGGATGGAGGATAGAGTAT |
| 1606 | Encoding | GGATAGAGTATAGTTGGGTGCACGAAGGGAACAGG |
| | Probe 1559 | GCGTTGAGGTGGATGGAGGATAGAGTAT |
| 1607 | Encoding | GGATAGAGTATAGTTGGGCGGGAAGGGAACAGGGC |
| | Probe 1560 | GTTGCAGGTGGATGGAGGATAGAGTAT |
| 1608 | Encoding | GATAAGTAAGTAGGGATGGGAAGGGAACAGGGCGT |
| | Probe 1561 | TGCCGGAGGTGGAGGATAAGTAAGT |
| 1609 | Encoding | GATAAGTAAGTAGGGATGGGAAAGGGAACAGGGCG |
| | Probe 1562 | TTGCAGGTGGTGGAGGATAAGTAAGT |
| 1610 | Encoding | GATAAGTAAGTAGGGATGCGAGAAGGGAACAGGGC |
| | Probe 1563 | GTTGAGGTGGTGGAGGATAAGTAAGT |
| 1611 | Encoding | GATAAGTAAGTAGGGATGTTCAACAGGGCGTTGCCC |
| | Probe 1564 | CTGGCAGGTGGAGGATAAGTAAGT |
| 1612 | Encoding | GATAAGTAAGTAGGGATGGCGCGAAGGGAACAGGG |
| | Probe 1565 | CGTTCGGTGGTGGAGGATAAGTAAGT |
| 1613 | Encoding | GATAAGTAAGTAGGGATGCTTGAACAGGGCGTTGCC |
| | Probe 1566 | CCTCGCGGTGGAGGATAAGTAAGT |
| 1614 | Encoding | GATAAGTAAGTAGGGATGGCACGAAGGGAACAGGG |
| | Probe 1567 | CGTTGAGGTGGTGGAGGATAAGTAAGT |
| 1615 | Encoding | GATAAGTAAGTAGGGATGCGGGAAGGGAACAGGGC |
| | Probe 1568 | GTTGCAGGTGGTGGAGGATAAGTAAGT |
| 1616 | Encoding | TGTAATAGTAAGGAGGGAGAAGACCGTAATCTTCCC |
| | Probe 1569 | TTCACAGGGTGAGTGTAATAGTAA |
| 1617 | Encoding | TGTAATAGTAAGGAGGGATCTTTCCGACCGTAATCT |
| | Probe 1570 | TCCGAAGGGTGAGTGTAATAGTAA |
| 1618 | Encoding | TGTAATAGTAAGGAGGGATGATGCACAGATCTTCCG |
| | Probe 1571 | ACCCATGGGTGAGTGTAATAGTAA |
| 1619 | Encoding | TGTAATAGTAAGGAGGGAAGACGACCGTAATCTTCC |
| | Probe 1572 | CTTCACAGGGTGAGTGTAATAGTAA |
| 1620 | Encoding | TGTAATAGTAAGGAGGGAATTTTCCCTTCTGTACAC |
| | Probe 1573 | CCGTAGCGGGTGAGTGTAATAGTAA |
| 1621 | Encoding | TGTAATAGTAAGGAGGGAGTGATGCACAGATCTTCC |
| | Probe 1574 | GACCCATGGGTGAGTGTAATAGTAA |
| 1622 | Encoding | TGTAATAGTAAGGAGGGAGTCCTTCCGACCGTAATC |
| | Probe 1575 | TTCCGAAGGGTGAGTGTAATAGTAA |
| 1623 | Encoding | TGTAATAGTAAGGAGGGAATTTTCCCTTCTGTACAC |
| | Probe 1576 | CCGAAGTGGGTGAGTGTAATAGTAA |
| 1624 | Encoding | GATAAGTAAGTAGGGATGGAAGACCGTAATCTTCCC |
| | Probe 1577 | TTCACAGGTGGAGGATAAGTAAGT |
| 1625 | Encoding | GATAAGTAAGTAGGGATGTCTTTCCGACCGTAATCT |
| | Probe 1578 | TCCGAAGGTGGAGGATAAGTAAGT |
| 1626 | Encoding | GATAAGTAAGTAGGGATGTGATGCACAGATCTTCCG |
| | Probe 1579 | ACCCATGGTGGAGGATAAGTAAGT |
| 1627 | Encoding | GATAAGTAAGTAGGGATGAGACGACCGTAATCTTCC |
| | Probe 1580 | CTTCACAGGTGGAGGATAAGTAAGT |
| 1628 | Encoding | GATAAGTAAGTAGGGATGATTTTCCCTTCTGTACAC |
| | Probe 1581 | CCGTAGCGGTGGAGGATAAGTAAGT |
| 1629 | Encoding | GATAAGTAAGTAGGGATGGTGATGCACAGATCTTCC |
| | Probe 1582 | GACCCATGGTGGAGGATAAGTAAGT |
| 1630 | Encoding | GATAAGTAAGTAGGGATGGTCCTTCCGACCGTAATC |
| | Probe 1583 | TTCCGAAGGTGGAGGATAAGTAAGT |
| 1631 | Encoding | GATAAGTAAGTAGGGATGATTTTCCCTTCTGTACAC |
| | Probe 1584 | CCGAAGGGTGGAGGATAAGTAAGT |
| 1632 | Encoding | AATGATATGTTGAGTGGGCGTCTGTTTCCTGTTACCG |
| | Probe 1585 | TTGCTGTGGTGGAATGATATGTT |
| 1633 | Encoding | AATGATATGTTGAGTGGGCGGTCGTCAGCGAAACAG |
| | Probe 1586 | CAACGAGTGGTGGAATGATATGTT |
| 1634 | Encoding | AATGATATGTTGAGTGGGTGTCAAACAGCAAGCTGT |
| | Probe 1587 | TTCCACAGTGGTGGAATGATATGTT |
| 1635 | Encoding | AATGATATGTTGAGTGGGTTGCAAGCTGTTTCCTGTT |
| | Probe 1588 | ACGCAGTGGTGGAATGATATGTT |
| 1636 | Encoding | AATGATATGTTGAGTGGGAGTGAAACAGCAAGCTGT |
| | Probe 1589 | TTCGACGTGGTGGAATGATATGTT |
| 1637 | Encoding | AATGATATGTTGAGTGGGTGTAAGCTGTTTCCTGTTA |
| | Probe 1590 | CCCAAGTGGTGGAATGATATGTT |
| 1638 | Encoding | AATGATATGTTGAGTGGGCGTCTGTTTCCTGTTACCG |
| | Probe 1591 | TTCCTGGTGGTGGAATGATATGTT |
| 1639 | Encoding | AATGATATGTTGAGTGGGTGGTCGTCAGCGAAACAG |
| | Probe 1592 | CAAGGACGTGGTGGAATGATATGTT |
| 1640 | Encoding | AGTATTATTAGGGTGAGGCGTCTGTTTCCTGTTACCG |
| | Probe 1593 | TTGCTGGGTTGGAGTATTATTAG |
| 1641 | Encoding | AGTATTATTAGGGTGAGGCGGTCGTCAGCGAAACAG |
| | Probe 1594 | CAACGAGGGTTGGAGTATTATTAG |
| 1642 | Encoding | AGTATTATTAGGGTGAGGGTCAAACAGCAAGCTGTT |
| | Probe 1595 | TCCACAGGGTTGGAGTATTATTAG |
| 1643 | Encoding | AGTATTATTAGGGTGAGGTTGCAAGCTGTTTCCTGTT |
| | Probe 1596 | ACGCAGGGTTGGAGTATTATTAG |
| 1644 | Encoding | AGTATTATTAGGGTGAGGAGTGAAACAGCAAGCTGT |
| | Probe 1597 | TTCGACGGGTTGGAGTATTATTAG |
| 1645 | Encoding | AGTATTATTAGGGTGAGGTGTAAGCTGTTTCCTGTTA |
| | Probe 1598 | CCCAAGGGTTGGAGTATTATTAG |
| 1646 | Encoding | AGTATTATTAGGGTGAGGCGTCTGTTTCCTGTTACCG |
| | Probe 1599 | TTCCTGTGGGTTGGAGTATTATTAG |
| 1647 | Encoding | AGTATTATTAGGGTGAGGTGGTCGTCAGCGAAACAG |
| | Probe 1600 | CAAGGACGGGTTGGAGTATTATTAG |
| 1648 | Encoding | TGTATAGGATTAGAAGGGAGACATACTCTAGCTCGT |
| | Probe 1601 | CAGAAAGGGTGAGTGTATAGGATT |
| 1649 | Encoding | TGTATAGGATTAGAAGGGTTTGCAAAGTATTAATTT |
| | Probe 1602 | ACTGCCCTAGGTGGGTGAGTGTATAGGATT |
| 1650 | Encoding | TGTATAGGATTAGAAGGGTTTAGCAAAGTATTAATT |
| | Probe 1603 | TACTGCCCAAGTGGGTGAGTGTATAGGATT |
| 1651 | Encoding | TGTATAGGATTAGAAGGGATGTAGCTCGTCAGTTTT |
| | Probe 1604 | GAAACGTGGGTGAGTGTATAGGATT |
| 1652 | Encoding | TGTATAGGATTAGAAGGGTTTAGCAAAGTATTAATT |
| | Probe 1605 | TACTGCCGAAGGGTGAGTGTATAGGATT |
| 1653 | Encoding | TGTATAGGATTAGAAGGGATGTAGCTCGTCAGTTTT |
| | Probe 1606 | GAATCGTGGGTGAGTGTATAGGATT |
| 1654 | Encoding | TGTATAGGATTAGAAGGGTTTGCAAAGTATTAATTT |
| | Probe 1607 | ACTGCCCAAGTGGGTGAGTGTATAGGATT |
| 1655 | Encoding | TGTATAGGATTAGAAGGGTGAAGCTCGTCAGTTTTG |
| | Probe 1608 | AATCGTGGGTGAGTGTATAGGATT |
| 1656 | Encoding | AGTATTATTAGGGTGAGGAGACATACTCTAGCTCGT |
| | Probe 1609 | CAGAAAGGGTTGGAGTATTATTAG |
| 1657 | Encoding | AGTATTATTAGGGTGAGGTTTGCAAAGTATTAATTT |
| | Probe 1610 | ACTGCCCTAGGTGGGTTGGAGTATTATTAG |
| 1658 | Encoding | AGTATTATTAGGGTGAGGTTTAGCAAAGTATTAATT |
| | Probe 1611 | TACTGCCCAAGTGGGTTGGAGTATTATTAG |
| 1659 | Encoding | AGTATTATTAGGGTGAGGATGTAGCTCGTCAGTTTT |
| | Probe 1612 | GAAACGTGGGTTGGAGTATTATTAG |
| 1660 | Encoding | AGTATTATTAGGGTGAGGTTTAGCAAAGTATTAATT |
| | Probe 1613 | TACTGCCGAAGGGTTGGAGTATTATTAG |
| 1661 | Encoding | AGTATTATTAGGGTGAGGATGTAGCTCGTCAGTTTT |
| | Probe 1614 | GAATCGTGGGTTGGAGTATTATTAG |
| 1662 | Encoding | AGTATTATTAGGGTGAGGTTTGCAAAGTATTAATTT |
| | Probe 1615 | ACTGCCCAAGTGGGTTGGAGTATTATTAG |
| 1663 | Encoding | AGTATTATTAGGGTGAGGTGAAGCTCGTCAGTTTTG |
| | Probe 1616 | AATCGTGGGTTGGAGTATTATTAG |
| 1664 | Encoding | GGATAGAGTATAGTTGGGTGCAGCCAGTAAACTGGC |
| | Probe 1617 | AGAAAGGTGGATGGAGGATAGAGTAT |
| 1665 | Encoding | GGATAGAGTATAGTTGGGTGTGTAGACAACTGCCTC |
| | Probe 1618 | CCTTCGCGGATGGAGGATAGAGTAT |
| 1666 | Encoding | GGATAGAGTATAGTTGGGTGCCTGGCAACTGGACGT |
| | Probe 1619 | AGGCCAGGATGGAGGATAGAGTAT |
| 1667 | Encoding | GGATAGAGTATAGTTGGGAGATCCCGTTCGCTACCC |
| | Probe 1620 | ACGGAAGGATGGAGGATAGAGTAT |
| 1668 | Encoding | GGATAGAGTATAGTTGGGTCGGAGCATTGTTAAGAG |
| | Probe 1621 | GCCAGAGGATGGAGGATAGAGTAT |
| 1669 | Encoding | GGATAGAGTATAGTTGGGTGGCACTAACCTTTCCTA |
| | Probe 1622 | ATTTCCACGGCGGATGGAGGATAGAGTAT |
| 1670 | Encoding | GGATAGAGTATAGTTGGGTGTGGACTTAAGCGCCCA |
| | Probe 1623 | CCTAGCGGGATGGAGGATAGAGTAT |
| 1671 | Encoding | GGATAGAGTATAGTTGGGCCACGTCATACACAAAAC |
| | Probe 1624 | TATTCGCAAACGGATGGAGGATAGAGTAT |
| 1672 | Encoding | AGTATTATTAGGGTGAGGGCAGCCAGTAAACTGGCA |
| | Probe 1625 | GAAAGGTGGGTTGGAGTATTATTAG |
| 1673 | Encoding | AGTATTATTAGGGTGAGGGTGTAGACAACTGCCTCC |
| | Probe 1626 | CTTCGCGGGTTGGAGTATTATTAG |
| 1674 | Encoding | AGTATTATTAGGGTGAGGTGCCTGGCAACTGGACGT |
| | Probe 1627 | AGGCCAGGGTTGGAGTATTATTAG |
| 1675 | Encoding | AGTATTATTAGGGTGAGGAGATCCCGTTCGCTACCC |
| | Probe 1628 | ACGGAAGGGTTGGAGTATTATTAG |
| 1676 | Encoding | AGTATTATTAGGGTGAGGTCGGAGCATTGTTAAGAG |
| | Probe 1629 | GCCAGAGGGTTGGAGTATTATTAG |
| 1677 | Encoding | AGTATTATTAGGGTGAGGTGGCACTAACCTTTCCTA |
| | Probe 1630 | ATTTCCACGGCGGGTTGGAGTATTATTAG |
| 1678 | Encoding | AGTATTATTAGGGTGAGGGTGGACTTAAGCGCCCAC |
| | Probe 1631 | CTAGCGTGGGTTGGAGTATTATTAG |
| 1679 | Encoding | AGTATTATTAGGGTGAGGCCACGTCATACACAAAAC |
| | Probe 1632 | TATTCGCAAACGGGTTGGAGTATTATTAG |
| 1680 | Encoding | TGTAATAGTAAGGAGGGAAGTGGATTGCTCCTTTGA |
| | Probe 1633 | TTATCTTCGGGTGAGTGTAATAGTAA |
| 1681 | Encoding | TGTAATAGTAAGGAGGGAGAGCTACCGTCATCATCT |
| | Probe 1634 | TCAGTCGGGTGAGTGTAATAGTAA |
| 1682 | Encoding | TGTAATAGTAAGGAGGGAGAGCCTCGTTAGCGGGAT |
| | Probe 1635 | GTCTTCGGGTGAGTGTAATAGTAA |
| 1683 | Encoding | TGTAATAGTAAGGAGGGACTAACAAGAATCAATAG |
| | Probe 1636 | CAAGCATTGGGTGAGTGTAATAGTAA |
| 1684 | Encoding | TGTAATAGTAAGGAGGGAAGATACCGTCATCATCTT |
| | Probe 1637 | CACTCTGGGTGAGTGTAATAGTAA |
| 1685 | Encoding | TGTAATAGTAAGGAGGGAGCTTGGGACCATTTTTAG |
| | Probe 1638 | GGTAAAGGGTGAGTGTAATAGTAA |
| 1686 | Encoding | TGTAATAGTAAGGAGGGACTAACAAGAATCAATAG |
| | Probe 1639 | CAAGCTTTTGGGTGAGTGTAATAGTAA |
| 1687 | Encoding | TGTAATAGTAAGGAGGGAGTCGATTGCTCCTTTGAT |
| | Probe 1640 | TATCATCGTGGGTGAGTGTAATAGTAA |
| 1688 | Encoding | AGTATTATTAGGGTGAGGAGTGGATTGCTCCTTTGA |
| | Probe 1641 | TTATCTTCGGGTTGGAGTATTATTAG |
| 1689 | Encoding | AGTATTATTAGGGTGAGGGAGCTACCGTCATCATCT |
| | Probe 1642 | TCAGTCGGGTTGGAGTATTATTAG |
| 1690 | Encoding | AGTATTATTAGGGTGAGGGAGCCTCGTTAGCGGGAT |
| | Probe 1643 | GTCTTCGGGTTGGAGTATTATTAG |
| 1691 | Encoding | AGTATTATTAGGGTGAGGCTAACAAGAATCAATAGC |
| | Probe 1644 | AAGCATTGGGTTGGAGTATTATTAG |
| 1692 | Encoding | AGTATTATTAGGGTGAGGAGATACCGTCATCATCTT |
| | Probe 1645 | CACTCTGGGTTGGAGTATTATTAG |
| 1693 | Encoding | AGTATTATTAGGGTGAGGGCTTGGGACCATTTTTAG |
| | Probe 1646 | GGTAAAGGGTTGGAGTATTATTAG |
| 1694 | Encoding | AGTATTATTAGGGTGAGGCTAACAAGAATCAATAGC |
| | Probe 1647 | AAGCTTTTGGGTTGGAGTATTATTAG |
| 1695 | Encoding | AGTATTATTAGGGTGAGGGTCGATTGCTCCTTTGATT |
| | Probe 1648 | ATCATCGTGGGTTGGAGTATTATTAG |
| 1696 | Encoding | AATGATATGTTGAGTGGGCCGCTCCTATAGCATGAG |
| | Probe 1649 | GCCTACGGTGGTGGAATGATATGTT |
| 1697 | Encoding | AATGATATGTTGAGTGGGTGGATCGTAGCAACTAGA |
| | Probe 1650 | GACAAGCCAGTGGTGGAATGATATGTT |
| 1698 | Encoding | AATGATATGTTGAGTGGGTCGCTGTGTCCACTTTCTC |
| | Probe 1651 | TTTCCTCGTGGTGGAATGATATGTT |
| 1699 | Encoding | AATGATATGTTGAGTGGGAAACATCGGTCTTGCACA |
| | Probe 1652 | ACCCGGGTGGTGGAATGATATGTT |
| 1700 | Encoding | AATGATATGTTGAGTGGGTAGGCAAGCTAGATCATG |
| | Probe 1653 | CTGCGCAGTGGTGGAATGATATGTT |
| 1701 | Encoding | AATGATATGTTGAGTGGGTAGGCAAGCTAGATCATG |
| | Probe 1654 | CTGGGCGTGGTGGAATGATATGTT |
| 1702 | Encoding | AATGATATGTTGAGTGGGTAGCACCTAATATTAGTA |
| | Probe 1655 | AGTGCGTAAGTGGTGGAATGATATGTT |
| 1703 | Encoding | AATGATATGTTGAGTGGGCTGCGATGCATTTTCTGG |
| | Probe 1656 | GATATCGTGGTGGAATGATATGTT |
| 1704 | Encoding | ATGTATTAAGAGGAGGGACCGCTCCTATAGCATGAG |
| | Probe 1657 | GCCTACGGAGGAGGATGTATTAAGA |
| 1705 | Encoding | ATGTATTAAGAGGAGGGAGGATCGTAGCAACTAGA |
| | Probe 1658 | GACAAGCCAGAGGAGGATGTATTAAGA |
| 1706 | Encoding | ATGTATTAAGAGGAGGGATCGCTGTGTCCACTTTCT |
| | Probe 1659 | CTTTCCTCGAGGAGGATGTATTAAGA |
| 1707 | Encoding | ATGTATTAAGAGGAGGGAAAACATCGGTCTTGCACA |
| | Probe 1660 | ACCCGGGAGGAGGATGTATTAAGA |
| 1708 | Encoding | ATGTATTAAGAGGAGGGATAGGCAAGCTAGATCATG |
| | Probe 1661 | CTGCGCAGAGGAGGATGTATTAAGA |
| 1709 | Encoding | ATGTATTAAGAGGAGGGATAGGCAAGCTAGATCATG |
| | Probe 1662 | CTGGGCGAGGAGGATGTATTAAGA |
| 1710 | Encoding | ATGTATTAAGAGGAGGGATAGCACCTAATATTAGTA |
| | Probe 1663 | AGTGCGTAAGAGGAGGATGTATTAAGA |
| 1711 | Encoding | ATGTATTAAGAGGAGGGACTGCGATGCATTTTCTGG |
| | Probe 1664 | GATATCGAGGAGGATGTATTAAGA |
| 1712 | Encoding | TGTATAGGATTAGAAGGGTTTGCCTTTCAACTTTCTT |
| | Probe 1665 | CCATGGCCGGGTGAGTGTATAGGATT |
| 1713 | Encoding | TGTATAGGATTAGAAGGGTGGTCGGAAAATAGTGTT |
| | Probe 1666 | ATACGGATAGGGTGAGTGTATAGGATT |
| 1714 | Encoding | TGTATAGGATTAGAAGGGAGGGCGGAAAATAGTGTT |
| | Probe 1667 | ATACGCATGGGTGAGTGTATAGGATT |
| 1715 | Encoding | TGTATAGGATTAGAAGGGTGCTGGGAAGCTCTATCT |
| | Probe 1668 | CTAGACACGGGTGAGTGTATAGGATT |
| 1716 | Encoding | TGTATAGGATTAGAAGGGTGTATACTCTCATCCTTGT |
| | Probe 1669 | TCTTCAGAGGGTGAGTGTATAGGATT |
| 1717 | Encoding | TGTATAGGATTAGAAGGGAGGGCGGAAAATAGTGTT |
| | Probe 1670 | ATACGGATAGGGTGAGTGTATAGGATT |
| 1718 | Encoding | TGTATAGGATTAGAAGGGAAAGAGATTAGCTTAGCC |
| | Probe 1671 | TCGGCTGGGTGAGTGTATAGGATT |
| 1719 | Encoding | TGTATAGGATTAGAAGGGTAAACTCTCATCCTTGTTC |
| | Probe 1672 | TTCAGAGGGTGAGTGTATAGGATT |
| 1720 | Encoding | ATGTATTAAGAGGAGGGATTTGCCTTTCAACTTTCTT |
| | Probe 1673 | CCATGGCCGAGGAGGATGTATTAAGA |
| 1721 | Encoding | ATGTATTAAGAGGAGGGAGGTCGGAAAATAGTGTTA |
| | Probe 1674 | TACGGATAGAGGAGGATGTATTAAGA |
| 1722 | Encoding | ATGTATTAAGAGGAGGGAAGGGCGGAAAATAGTGT |
| | Probe 1675 | TATACGCATGAGGAGGATGTATTAAGA |
| 1723 | Encoding | ATGTATTAAGAGGAGGGAGCTGGGAAGCTCTATCTC |
| | Probe 1676 | TAGACACGAGGAGGATGTATTAAGA |
| 1724 | Encoding | ATGTATTAAGAGGAGGGAGTATACTCTCATCCTTGT |
| | Probe 1677 | TCTTCAGAGAGGAGGATGTATTAAGA |
| 1725 | Encoding | ATGTATTAAGAGGAGGGAAGGGCGGAAAATAGTGT |
| | Probe 1678 | TATACGGATAGAGGAGGATGTATTAAGA |
| 1726 | Encoding | ATGTATTAAGAGGAGGGAAAAGAGATTAGCTTAGCC |
| | Probe 1679 | TCGGCTGAGGAGGATGTATTAAGA |
| 1727 | Encoding | ATGTATTAAGAGGAGGGATAAACTCTCATCCTTGTT |
| | Probe 1680 | CTTCAGAGAGGAGGATGTATTAAGA |
| 1728 | Encoding | ATGGAAGTAGTAGAAGGGTGTAGCTCCCGGGTGCTT |
| | Probe 1681 | ATGCCCAGGGATGTATGGAAGTAGT |
| 1729 | Encoding | ATGGAAGTAGTAGAAGGGTGCGCTAAAGCAAACAC |
| | Probe 1682 | ACTTCCTAGGTGGGATGTATGGAAGTAGT |
| 1730 | Encoding | ATGGAAGTAGTAGAAGGGTGCGCTAAAGCAAACAC |
| | Probe 1683 | ACTTCCAAGTGGGATGTATGGAAGTAGT |
| 1731 | Encoding | ATGGAAGTAGTAGAAGGGACTCGTTATTTCTCGGAT |
| | Probe 1684 | TCGGAGTGGGATGTATGGAAGTAGT |
| 1732 | Encoding | ATGGAAGTAGTAGAAGGGCGGTAAAGCAAACACAC |
| | Probe 1685 | TTCCTAGGTGGGATGTATGGAAGTAGT |
| 1733 | Encoding | ATGGAAGTAGTAGAAGGGTCTTTATTTCTCGGATTC |
| | Probe 1686 | GCTGGCGGGATGTATGGAAGTAGT |
| 1734 | Encoding | ATGGAAGTAGTAGAAGGGTGCGGTGTTCCTCCTGAT |
| | Probe 1687 | CTCTTGCGGGATGTATGGAAGTAGT |
| 1735 | Encoding | ATGGAAGTAGTAGAAGGGCGTCGCTCCCGGGTGCTT |
| | Probe 1688 | ATGGCCGGGATGTATGGAAGTAGT |
| 1736 | Encoding | ATGTATTAAGAGGAGGGAGTAGCTCCCGGGTGCTTA |
| | Probe 1689 | TGCCCAGAGGAGGATGTATTAAGA |
| 1737 | Encoding | ATGTATTAAGAGGAGGGAGCGCTAAAGCAAACACA |
| | Probe 1690 | CTTCCTAGGGAGGAGGATGTATTAAGA |
| 1738 | Encoding | ATGTATTAAGAGGAGGGAGCGCTAAAGCAAACACA |
| | Probe 1691 | CTTCCAAGGAGGAGGATGTATTAAGA |
| 1739 | Encoding | ATGTATTAAGAGGAGGGAACTCGTTATTTCTCGGAT |
| | Probe 1692 | TCGGAGGAGGAGGATGTATTAAGA |
| 1740 | Encoding | ATGTATTAAGAGGAGGGACGGTAAAGCAAACACAC |
| | Probe 1693 | TTCCTAGGGAGGAGGATGTATTAAGA |
| 1741 | Encoding | ATGTATTAAGAGGAGGGATCTTTATTTCTCGGATTCG |
| | Probe 1694 | CTGGCGAGGAGGATGTATTAAGA |
| 1742 | Encoding | ATGTATTAAGAGGAGGGAGCGGTGTTCCTCCTGATC |
| | Probe 1695 | TCTTGCGAGGAGGATGTATTAAGA |
| 1743 | Encoding | ATGTATTAAGAGGAGGGACGTCGCTCCCGGGTGCTT |
| | Probe 1696 | ATGGCCGAGGAGGATGTATTAAGA |
| 1744 | Encoding | TGTAATAGTAAGGAGGGAGGCGCTCTCATTCTTAAT |
| | Probe 1697 | ATCTTCGTAGCGGGTGAGTGTAATAGTAA |
| 1745 | Encoding | TGTAATAGTAAGGAGGGATTCTATCTCTACGCCTGT |
| | Probe 1698 | CATGTCGGGTGAGTGTAATAGTAA |
| 1746 | Encoding | TGTAATAGTAAGGAGGGAGGTCTGCACCGAATAAAT |
| | Probe 1699 | CCTAAGTGGGTGAGTGTAATAGTAA |
| 1747 | Encoding | TGTAATAGTAAGGAGGGAGTACTTTCGTCCCTGTTG |
| | Probe 1700 | ATACTTGGGTGAGTGTAATAGTAA |
| 1748 | Encoding | TGTAATAGTAAGGAGGGAAGGATGCAATCCTCGGGT |
| | Probe 1701 | TAACGGTGGGTGAGTGTAATAGTAA |
| 1749 | Encoding | TGTAATAGTAAGGAGGGACAATGTGATTTGCTTAAC |
| | Probe 1702 | GTCCGGTGGGTGAGTGTAATAGTAA |
| 1750 | Encoding | TGTAATAGTAAGGAGGGAAGTGACTTCGGGTGCTTC |
| | Probe 1703 | CAAGAGTGGGTGAGTGTAATAGTAA |
| 1751 | Encoding | TGTAATAGTAAGGAGGGAGTAGGGATTCCTCCCCGA |
| | Probe 1704 | CACAATGGGTGAGTGTAATAGTAA |
| 1752 | Encoding | ATGTATTAAGAGGAGGGAGGCGCTCTCATTCTTAAT |
| | Probe 1705 | ATCTTCGTAGCGAGGAGGATGTATTAAGA |
| 1753 | Encoding | ATGTATTAAGAGGAGGGATTCTATCTCTACGCCTGT |
| | Probe 1706 | CATGTCGAGGAGGATGTATTAAGA |
| 1754 | Encoding | ATGTATTAAGAGGAGGGAGGTCTGCACCGAATAAAT |
| | Probe 1707 | CCTAAGGAGGAGGATGTATTAAGA |
| 1755 | Encoding | ATGTATTAAGAGGAGGGAGTACTTTCGTCCCTGTTG |
| | Probe 1708 | ATACTTGAGGAGGATGTATTAAGA |
| 1756 | Encoding | ATGTATTAAGAGGAGGGAAGGATGCAATCCTCGGGT |
| | Probe 1709 | TAACGGGAGGAGGATGTATTAAGA |
| 1757 | Encoding | ATGTATTAAGAGGAGGGACAATGTGATTTGCTTAAC |
| | Probe 1710 | GTCCGGGAGGAGGATGTATTAAGA |
| 1758 | Encoding | ATGTATTAAGAGGAGGGAAGTGACTTCGGGTGCTTC |
| | Probe 1711 | CAAGAGGAGGAGGATGTATTAAGA |
| 1759 | Encoding | ATGTATTAAGAGGAGGGAGTAGGGATTCCTCCCCGA |
| | Probe 1712 | CACAATGAGGAGGATGTATTAAGA |
| 1760 | Encoding | AATGATATGTTGAGTGGGTTTTTCTCTCCAATTTGTA |
| | Probe 1713 | ACGAAGAGTGGTGGAATGATATGTT |
| 1761 | Encoding | AATGATATGTTGAGTGGGTGATGCCTCTATATAGTT |
| | Probe 1714 | GGCTGTGGTGGTGGAATGATATGTT |
| 1762 | Encoding | AATGATATGTTGAGTGGGTTATCTCTCCAATTTGTAA |
| | Probe 1715 | CGAAGAGTGGTGGAATGATATGTT |
| 1763 | Encoding | AATGATATGTTGAGTGGGAGGCTAGTATCATGTGAT |
| | Probe 1716 | ACTTATGGGTAGTGGTGGAATGATATGTT |
| 1764 | Encoding | AATGATATGTTGAGTGGGTGAACCACTAGTATCATG |
| | Probe 1717 | TGATACTATAGTGGTGGAATGATATGTT |
| 1765 | Encoding | AATGATATGTTGAGTGGGAAACTCCATATCACTACT |
| | Probe 1718 | TAGCTTAGGGTGGTGGAATGATATGTT |
| 1766 | Encoding | AATGATATGTTGAGTGGGTGCTGCACAGATTACTTA |
| | Probe 1719 | ATATAACCTTGTGTGGTGGAATGATATGTT |
| 1767 | Encoding | AATGATATGTTGAGTGGGTGTAACCACCTGTATAGA |
| | Probe 1720 | CGTCGGCGTGGTGGAATGATATGTT |
| 1768 | Encoding | TAGAATTAGAGAGATGGGTTTTTCTCTCCAATTTGTA |
| | Probe 1721 | ACGAAGAGGTGGAGTAGAATTAGAG |
| 1769 | Encoding | TAGAATTAGAGAGATGGGTGATGCCTCTATATAGTT |
| | Probe 1722 | GGCTGTGGGTGGAGTAGAATTAGAG |
| 1770 | Encoding | TAGAATTAGAGAGATGGGTTATCTCTCCAATTTGTA |
| | Probe 1723 | ACGAAGAGGTGGAGTAGAATTAGAG |
| 1771 | Encoding | TAGAATTAGAGAGATGGGAGGCTAGTATCATGTGAT |
| | Probe 1724 | ACTTATGGGTAGGTGGAGTAGAATTAGAG |
| 1772 | Encoding | TAGAATTAGAGAGATGGGTGAACCACTAGTATCATG |
| | Probe 1725 | TGATACTATAGGTGGAGTAGAATTAGAG |
| 1773 | Encoding | TAGAATTAGAGAGATGGGAAACTCCATATCACTACT |
| | Probe 1726 | TAGCTTAGGTGGTGGAGTAGAATTAGAG |
| 1774 | Encoding | TAGAATTAGAGAGATGGGTGCTGCACAGATTACTTA |
| | Probe 1727 | ATATAACCTTGTGGTGGAGTAGAATTAGAG |
| 1775 | Encoding | TAGAATTAGAGAGATGGGTGTAACCACCTGTATAGA |
| | Probe 1728 | CGTCGGCGGTGGAGTAGAATTAGAG |
| 1776 | Encoding | ATGGAAGTAGTAGAAGGGTGCACCGGGAGCCTTTGG |
| | Probe 1729 | CACGGTGGGATGTATGGAAGTAGT |
| 1777 | Encoding | ATGGAAGTAGTAGAAGGGTGGCTCGGCTTTTCACCC |
| | Probe 1730 | CGAAGGTGGGATGTATGGAAGTAGT |
| 1778 | Encoding | ATGGAAGTAGTAGAAGGGAAACTTCCGACTTGTATT |
| | Probe 1731 | GCCCAGTGGGATGTATGGAAGTAGT |
| 1779 | Encoding | ATGGAAGTAGTAGAAGGGTGCGCTCAGTCAATTAAC |
| | Probe 1732 | ATTCCAAGGTGGGATGTATGGAAGTAGT |
| 1780 | Encoding | ATGGAAGTAGTAGAAGGGTGGCAACTTCCTCTTAAT |
| | Probe 1733 | TGCTTCCGAGGGATGTATGGAAGTAGT |
| 1781 | Encoding | ATGGAAGTAGTAGAAGGGAGCAGCTCCCTGCTTTCG |
| | Probe 1734 | CTTCCCGGGATGTATGGAAGTAGT |
| 1782 | Encoding | ATGGAAGTAGTAGAAGGGACGAGCTTTCTCTGTTTG |
| | Probe 1735 | CTAGACGGGATGTATGGAAGTAGT |
| 1783 | Encoding | ATGGAAGTAGTAGAAGGGACGCGTAGGGAACAGAA |
| | Probe 1736 | TGTTTGAGGGATGTATGGAAGTAGT |
| 1784 | Encoding | TAGAATTAGAGAGATGGGTGCACCGGGAGCCTTTGG |
| | Probe 1737 | CACGGTGGTGGAGTAGAATTAGAG |
| 1785 | Encoding | TAGAATTAGAGAGATGGGTGGCTCGGCTTTTCACCC |
| | Probe 1738 | CGAAGGTGGTGGAGTAGAATTAGAG |
| 1786 | Encoding | TAGAATTAGAGAGATGGGAAACTTCCGACTTGTATT |
| | Probe 1739 | GCCCAGGGTGGAGTAGAATTAGAG |
| 1787 | Encoding | TAGAATTAGAGAGATGGGTGCGCTCAGTCAATTAAC |
| | Probe 1740 | ATTCCAAGGTGGTGGAGTAGAATTAGAG |
| 1788 | Encoding | TAGAATTAGAGAGATGGGTGGCAACTTCCTCTTAAT |
| | Probe 1741 | TGCTTCCGAGGTGGAGTAGAATTAGAG |
| 1789 | Encoding | TAGAATTAGAGAGATGGGAGCAGCTCCCTGCTTTCG |
| | Probe 1742 | CTTCCCGGTGGAGTAGAATTAGAG |
| 1790 | Encoding | TAGAATTAGAGAGATGGGACGAGCTTTCTCTGTTTG |
| | Probe 1743 | CTAGACGGTGGAGTAGAATTAGAG |
| 1791 | Encoding | TAGAATTAGAGAGATGGGACGCGTAGGGAACAGAA |
| | Probe 1744 | TGTTTGAGGTGGAGTAGAATTAGAG |
| 1792 | Encoding | GGATAGAGTATAGTTGGGCGTCCCCTCTGTAAGCGG |
| | Probe 1745 | ATTAGAGGATGGAGGATAGAGTAT |
| 1793 | Encoding | GGATAGAGTATAGTTGGGCCACCGTCAAATTTCTCT |
| | Probe 1746 | TTCTAGAGGATGGAGGATAGAGTAT |
| 1794 | Encoding | GGATAGAGTATAGTTGGGTGTGCCTATCGGCAACAC |
| | Probe 1747 | TTAGATGGGATGGAGGATAGAGTAT |
| 1795 | Encoding | GGATAGAGTATAGTTGGGTGCGTGTCTCCATAACTT |
| | Probe 1748 | CGCACCCGGATGGAGGATAGAGTAT |
| 1796 | Encoding | GGATAGAGTATAGTTGGGAAGCCATTTTATCAATGG |
| | Probe 1749 | CAGTGATGGATGGAGGATAGAGTAT |
| 1797 | Encoding | GGATAGAGTATAGTTGGGTCTGCTCCCTCATTTCTGT |
| | Probe 1750 | TACCGGGATGGAGGATAGAGTAT |
| 1798 | Encoding | GGATAGAGTATAGTTGGGTGTCTAAAATGCTTTTTCC |
| | Probe 1751 | ATTGTGGAGGATGGAGGATAGAGTAT |
| 1799 | Encoding | GGATAGAGTATAGTTGGGTGAAGTTCATCAGTATCT |
| | Probe 1752 | TTTGCCCATGGGATGGAGGATAGAGTAT |
| 1800 | Encoding | TAGAATTAGAGAGATGGGCGTCCCCTCTGTAAGCGG |
| | Probe 1753 | ATTAGAGGTGGAGTAGAATTAGAG |
| 1801 | Encoding | TAGAATTAGAGAGATGGGCCACCGTCAAATTTCTCT |
| | Probe 1754 | TTCTAGAGGTGGAGTAGAATTAGAG |
| 1802 | Encoding | TAGAATTAGAGAGATGGGTGTGCCTATCGGCAACAC |
| | Probe 1755 | TTAGATGGGTGGAGTAGAATTAGAG |
| 1803 | Encoding | TAGAATTAGAGAGATGGGTGCGTGTCTCCATAACTT |
| | Probe 1756 | CGCACCCGGTGGAGTAGAATTAGAG |
| 1804 | Encoding | TAGAATTAGAGAGATGGGAAGCCATTTTATCAATGG |
| | Probe 1757 | CAGTGATGGTGGAGTAGAATTAGAG |
| 1805 | Encoding | TAGAATTAGAGAGATGGGTCTGCTCCCTCATTTCTGT |
| | Probe 1758 | TACCGGGTGGAGTAGAATTAGAG |
| 1806 | Encoding | TAGAATTAGAGAGATGGGTGTCTAAAATGCTTTTTC |
| | Probe 1759 | CATTGTGGAGGTGGAGTAGAATTAGAG |
| 1807 | Encoding | TAGAATTAGAGAGATGGGTGAAGTTCATCAGTATCT |
| | Probe 1760 | TTTGCCCATGGGTGGAGTAGAATTAGAG |

[0702] Although the present disclosure has been described with reference to the specific embodiments thereof, it should be understood by those skilled in the art that various changes may be made and equivalents may be substituted without departing from the true spirit and scope of the disclosure. In addition, many modifications may be made to adapt a particular situation, material, composition of matter, process, process step or steps, to the objective, spirit and scope of the present disclosure. All such modifications are intended to be within the scope of the claims appended hereto.

The application's sequence listing, which the Patent Office published only in electronic form, follows.

SEQUENCE LISTING (1821 sequences)

SEQ ID NO: 1 - DNA, 20 bp, synthetic construct
  source 1..20: mol_type = other DNA
  misc_feature 1: note = 5' Alexa Fluor dye 488 (NHS Ester)
tatccttcaatccctccaca

SEQ ID NO: 2 - DNA, 20 bp, synthetic construct
  source 1..20: mol_type = other DNA
  misc_feature 1: note = 5' Alexa Fluor dye 546 (NHS Ester)
acactaccaccatttcctat

SEQ ID NO: 3 - DNA, 20 bp, synthetic construct
  source 1..20: mol_type = other DNA
  misc_feature 1: note = 5' ROX (carboxy-X-rhodamine) (NHS Ester)
  misc_feature 20: note = 3' ROX (carboxy-X-rhodamine) (NHS Ester)
actccactactactcactct

SEQ ID NO: 4 - DNA, 20 bp, synthetic construct
  source 1..20: mol_type = other DNA
  misc_feature 1: note = 5' Pacific Green dye NHS ester
accctctaacttccatcaca

SEQ ID NO: 5 - DNA, 20 bp, synthetic construct
  source 1..20: mol_type = other DNA
  misc_feature 1: note = 5 Pacific Blue dye NHS ester
accacaacccattcctttca

SEQ ID NO: 6 - DNA, 20 bp, synthetic construct
  source 1..20: mol_type = other DNA
  misc_feature 1: note = Atto 610 dye
tttactccctacacctccaa

SEQ ID NO: 7 - DNA, 20 bp, synthetic construct
  source 1..20: mol_type = other DNA
  misc_feature 1: note = 5' Alexa Fluor dye 647 (NHS Ester)
accctttacaaacacaccct

SEQ ID NO: 8 - DNA, 20 bp, synthetic construct
  source 1..20: mol_type = other DNA
  misc_feature 1: note = DyLight 510-LS NHS Ester
  misc_feature 20: note = DyLight 510-LS NHS Ester
tcctattctcaacctaacct

SEQ ID NO: 9 - DNA, 20 bp, synthetic construct
  source 1..20: mol_type = other DNA
  misc_feature 1: note = Alexa Fluor 405 dye
ttctccctctatcaactcta

SEQ ID NO: 10 - DNA, 20 bp, synthetic construct
  source 1..20: mol_type = other DNA
  misc_structure 1: note = 5' Alexa Fluor 532 (NHS Ester]
acccttactactacatcatc

SEQ ID NO: 11 - DNA, 64 bp, synthetic construct
  source 1..64: mol_type = other DNA
tgtggagggattgaaggatacacctccttgctatagccaccttatgtggagggattgaaggata

SEQ ID NO: 12 - DNA, 64 bp, synthetic construct
  source 1..64: mol_type = other DNA
tgtggagggattgaaggataggcaacatcagagaagcaagcaagtgtggagggattgaaggata

SEQ ID NO: 13 - DNA, 64 bp, synthetic construct
  source 1..64: mol_type = other DNA
tgtggagggattgaaggataagcgacacaatgtcttctcccgtatgtggagggattgaaggata

SEQ ID NO: 14 - DNA, 65 bp, synthetic construct
  source 1..65: mol_type = other DNA
tgtggagggattgaaggatatctcaatgtcttctccccatcagtctgtggagggattgaaggata

SEQ ID NO: 15 - DNA, 68 bp, synthetic construct
  source 1..68: mol_type = other DNA
tgtggagggattgaaggatacatggcacctattttctatctagagcgatgtggagggattgaaggata

SEQ ID NO: 16 - DNA, 65 bp, synthetic construct
  source 1..65: mol_type = other DNA
tgtggagggattgaaggatactggaagacacaatgtcttctcaggtgtggagggattgaaggata

SEQ ID NO: 17 - DNA, 64 bp, synthetic construct
  source 1..64: mol_type = other DNA
tgtggagggattgaaggatagtccagccttaatgagtaccgctatgtggagggattgaaggata

SEQ ID NO: 18 - DNA, 69 bp, synthetic construct
  source 1..69: mol_type = other DNA
tgtggagggattgaaggataggatcgattaaaacgattataggtggatgtgtggagggattgaaggata

SEQ ID NO: 19 - DNA, 69 bp, synthetic construct
  source 1..69: mol_type = other DNA
tgtggagggattgaaggataggacgattaaaacgattataggtggttgttgtggagggattgaaggata

SEQ ID NO: 20 - DNA, 64 bp, synthetic construct
  source 1..64: mol_type = other DNA
tgtggagggattgaaggataattgacagcaagaccgtctttgtgtgtggagggattgaaggata

SEQ ID NO: 21 - DNA, 65 bp, synthetic construct
  source 1..65: mol_type = other DNA
tgtggagggattgaaggatagatattgtccaaaggacaatcctgttgtggagggattgaaggata

SEQ ID NO: 22 - DNA, 64 bp, synthetic construct
  source 1..64: mol_type = other DNA
tgtggagggattgaaggatattcacaatgtcttctccccatgtgtgtggagggattgaaggata

SEQ ID NO: 23 - DNA, 64 bp, synthetic construct
  source 1..64: mol_type = other DNA
tgtggagggattgaaggataggatcacccatgttctgactcggttgtggagggattgaaggata

SEQ ID NO: 24 - DNA, 64 bp, synthetic construct
  source 1..64: mol_type = other DNA
tgtggagggattgaaggataatcctcacgtttcaaaggctcgattgtggagggattgaaggata

SEQ ID NO: 25 - DNA, 65 bp, synthetic construct
  source 1..65: mol_type = other DNA
tgtggagggattgaaggataaagcgctaccctcagttcatcccgatgtggagggattgaaggata

SEQ ID NO: 26 - DNA, 64 bp, synthetic construct
  source 1..64: mol_type = other DNA
tgtggagggattgaaggataaagcctgaccaagggtagatctggtgtggagggattgaaggata

SEQ ID NO: 27 - DNA, 64 bp, synthetic construct
  source 1..64: mol_type = other DNA
tgtggagggattgaaggatattgcaacctgaccaagggtagtagtgtggagggattgaaggata

SEQ ID NO: 28 - DNA, 64 bp, synthetic construct
  source 1..64: mol_type = other DNA
tgtggagggattgaaggatagatatcagagaagcaagcttcagctgtggagggattgaaggata

SEQ ID NO: 29 - DNA, 66 bp, synthetic construct
  source 1..66: mol_type = other DNA
tgtggagggattgaaggataaggtcaagagagacaacattttcctgtgtggagggattgaaggata

SEQ ID NO: 30 - DNA, 66 bp, synthetic construct
  source 1..66: mol_type = other DNA
tgtggagggattgaaggatactattcgtctaatgtcgtcctttcattgtggagggattgaaggata

SEQ ID NO: 31 - DNA, 64 bp, synthetic construct
  source 1..64: mol_type = other DNA
tgtggagggattgaaggatatgactaatgcagcgcggatcctagtgtggagggattgaaggata

SEQ ID NO: 32 - DNA, 64 bp, synthetic construct
  source 1..64: mol_type = other DNA
tgtggagggattgaaggatatattgacagcaagaccgtcttagttgtggagggattgaaggata

SEQ ID NO: 33 - DNA, 65 bp, synthetic construct
  source 1..65: mol_type = other DNA
tgtggagggattgaaggatacagccgctaacatcagagaagcttctgtggagggattgaaggata

SEQ ID NO: 34 - DNA, 64 bp, synthetic construct
  source 1..64: mol_type = other DNA
tgtggagggattgaaggatacagctccacatgtcaccatgcaagtgtggagggattgaaggata

SEQ ID NO: 35 - DNA, 64 bp, synthetic construct
  source 1..64: mol_type = other DNA
tgtggagggattgaaggatacaaaaagccaacacagctaggcattgtggagggattgaaggata

SEQ ID NO: 36 - DNA, 66 bp, synthetic construct
  source 1..66: mol_type = other DNA
ataggaaatggtggtagtgtgatcaacaacgcataagcgtcgcacgataggaaatggtggtagtgt

SEQ ID NO: 37 - DNA, 67 bp, synthetic construct
  source 1..67: mol_type = other DNA
ataggaaatggtggtagtgtggaccaacaacgcataagcgtcgcacgataggaaatggtggtagtgt

SEQ ID NO: 38 - DNA, 66 bp, synthetic construct
  source 1..66: mol_type = other DNA
ataggaaatggtggtagtgtggaccaacaacgcataagcgtcggacataggaaatggtggtagtgt

SEQ ID NO: 39 - DNA, 66 bp, synthetic construct
  source 1..66: mol_type = other DNA
ataggaaatggtggtagtgtaagtcaggagactttaagtctcacccataggaaatggtggtagtgt

SEQ ID NO: 40 - DNA, 64 bp, synthetic construct
  source 1..64: mol_type = other DNA
ataggaaatggtggtagtgtttgggattacgggtctacgtttctataggaaatggtggtagtgt

SEQ ID NO: 41 - DNA, 66 bp, synthetic construct
  source 1..66: mol_type = other DNA
ataggaaatggtggtagtgtaggcaggagactttaagtctcagcctataggaaatggtggtagtgt

SEQ ID NO: 42 - DNA, 66 bp, synthetic construct
  source 1..66: mol_type = other DNA
ataggaaatggtggtagtgtggaaggagactttaagtctcaggctcataggaaatggtggtagtgt

SEQ ID NO: 43 - DNA, 65 bp, synthetic construct
  source 1..65: mol_type = other DNA
ataggaaatggtggtagtgtatgaacaacgcataagcgtcgcacgataggaaatggtggtagtgt

SEQ ID NO: 44 - DNA, 65 bp, synthetic construct
  source 1..65: mol_type = other DNA
ataggaaatggtggtagtgtggaccaacaacgcataagcgtccgaataggaaatggtggtagtgt

SEQ ID NO: 45 - DNA, 65 bp, synthetic construct
  source 1..65: mol_type = other DNA
ataggaaatggtggtagtgtgatcaacaacgcataagcgtcggacataggaaatggtggtagtgt

SEQ ID NO: 46 - DNA, 65 bp, synthetic construct
  source 1..65: mol_type = other DNA
ataggaaatggtggtagtgtaggcaggagactttaagtctcacccataggaaatggtggtagtgt

SEQ ID NO: 47 - DNA, 65 bp, synthetic construct
  source 1..65: mol_type = other DNA
ataggaaatggtggtagtgtgaaggagactttaagtctcaggctcataggaaatggtggtagtgt

SEQ ID NO: 48 - DNA, 65 bp, synthetic construct
  source 1..65: mol_type = other DNA
ataggaaatggtggtagtgtaaggagactttaagtctcagggtctataggaaatggtggtagtgt

SEQ ID NO: 49 - DNA, 65 bp, synthetic construct
  source 1..65: mol_type = other DNA
ataggaaatggtggtagtgttgttcagcgttaaaaggtaccgctaataggaaatggtggtagtgt

SEQ ID NO: 50 - DNA, 64 bp, synthetic construct
  source 1..64: mol_type = other DNA
ataggaaatggtggtagtgttggacaacgcataagcgtcgcacgataggaaatggtggtagtgt

SEQ ID NO: 51 - DNA, 64 bp, synthetic construct
  source 1..64: mol_type = other DNA
ataggaaatggtggtagtgtgatcaacaacgcataagcgtccgaataggaaatggtggtagtgt

SEQ ID NO: 52 - DNA, 64 bp, synthetic construct
  source 1..64: mol_type = other DNA
ataggaaatggtggtagtgtatgaacaacgcataagcgtcggacataggaaatggtggtagtgt

SEQ ID NO: 53 - DNA, 64 bp, synthetic construct
  source 1..64: mol_type = other DNA
ataggaaatggtggtagtgtggaccaacaacgcataagcgtgcgataggaaatggtggtagtgt

SEQ ID NO: 54 - DNA, 64 bp, synthetic construct
  source 1..64: mol_type = other DNA
ataggaaatggtggtagtgttgttcagcgttaaaaggtacccctataggaaatggtggtagtgt

SEQ ID NO: 55 - DNA, 64 bp, synthetic construct
  source 1..64: mol_type = other DNA
ataggaaatggtggtagtgtgtgcagcgttaaaaggtaccgctaataggaaatggtggtagtgt

SEQ ID NO: 56 - DNA, 65 bp, synthetic construct
  source 1..65: mol_type = other DNA
agagtgagtagtagtggagtgtgctcagtgttaaagtgcacccctagagtgagtagtagtggagt

SEQ ID NO: 57 - DNA, 64 bp, synthetic construct
  source 1..64: mol_type = other DNA
agagtgagtagtagtggagtccgctctgccaagttctgtggtacagagtgagtagtagtggagt

SEQ ID NO: 58 - DNA, 65 bp, synthetic construct
  source 1..65: mol_type = other DNA
agagtgagtagtagtggagtgagtgttaaagtgcaccggattacgagagtgagtagtagtggagt

SEQ ID NO: 59 - DNA, 65 bp, synthetic construct
  source 1..65: mol_type = other DNA
agagtgagtagtagtggagtcatcagctaacgatagtgtgacctcagagtgagtagtagtggagt

SEQ ID NO: 60 - DNA, 64 bp, synthetic construct
  source 1..64: mol_type = other DNA
agagtgagtagtagtggagttctttctccgcgaggataaccggtagagtgagtagtagtggagt

SEQ ID NO: 61 - DNA, 67 bp, synthetic construct
  source 1..67: mol_type = other DNA
agagtgagtagtagtggagtttccttctccgcgaggataacccctagagagtgagtagtagtggagt

SEQ ID NO: 62 - DNA, 64 bp, synthetic construct
  source 1..64: mol_type = other DNA
agagtgagtagtagtggagtgtcccatgggtaaaccacttctggagagtgagtagtagtggagt

SEQ ID NO: 63 - DNA, 64 bp, synthetic construct
  source 1..64: mol_type = other DNA
agagtgagtagtagtggagtagtacgcctcagtgttaaagtcgtagagtgagtagtagtggagt

SEQ ID NO: 64 - DNA, 64 bp, synthetic construct
  source 1..64: mol_type = other DNA
agagtgagtagtagtggagtgtgctcagtgttaaagtgcacgccagagtgagtagtagtggagt

SEQ ID NO: 65 - DNA, 64 bp, synthetic construct
  source 1..64: mol_type = other DNA
agagtgagtagtagtggagtccgcaaggcatctctgccaagaagagagtgagtagtagtggagt

SEQ ID NO: 66 - DNA, 64 bp, synthetic construct
  source 1..64: mol_type = other DNA
agagtgagtagtagtggagtagtgttaaagtgcaccggattacgagagtgagtagtagtggagt

SEQ ID NO: 67 - DNA, 64 bp, synthetic construct
  source 1..64: mol_type = other DNA
agagtgagtagtagtggagtataagctaacgatagtgtgacctcagagtgagtagtagtggagt

SEQ ID NO: 68 - DNA, 64 bp, synthetic construct
  source 1..64: mol_type = other DNA
agagtgagtagtagtggagtctctctccgcgaggataacccgtaagagtgagtagtagtggagt

SEQ ID NO: 69 - DNA, 64 bp, synthetic construct
  source 1..64: mol_type = other DNA
agagtgagtagtagtggagttcgctccgcgaggataacccctagagagtgagtagtagtggagt

SEQ ID NO: 70 - DNA, 64 bp, synthetic construct
  source 1..64: mol_type = other DNA
agagtgagtagtagtggagtagttccatgggtaaaccacttgtgagagtgagtagtagtggagt

SEQ ID NO: 71 - DNA, 64 bp, synthetic construct
  source 1..64: mol_type = other DNA
agagtgagtagtagtggagtgtacgcctcagtgttaaagtggtgagagtgagtagtagtggagt

SEQ ID NO: 72 - DNA, 64 bp, synthetic construct
  source 1..64: mol_type = other DNA
agagtgagtagtagtggagttgctcagtgttaaagtgcacccctagagtgagtagtagtggagt

SEQ ID NO: 73 - DNA, 65 bp, synthetic construct
  source 1..65: mol_type = other DNA
agagtgagtagtagtggagtgtacgcctcagtgttaaagtgctggagagtgagtagtagtggagt

SEQ ID NO: 74 - DNA, 64 bp, synthetic construct
  source 1..64: mol_type = other DNA
agagtgagtagtagtggagtgagtgttaaagtgcaccggataacagagtgagtagtagtggagt

SEQ ID NO: 75 - DNA, 69 bp, synthetic construct
  source 1..69: mol_type = other DNA
agagtgagtagtagtggagtcggagtgttaaagtgcaccggatttgggaagagtgagtagtagtggagt

SEQ ID NO: 76 - DNA, 64 bp, synthetic construct
  source 1..64: mol_type = other DNA
agagtgagtagtagtggagtcatcagctaacgatagtgtgagctagagtgagtagtagtggagt

SEQ ID NO: 77 - DNA, 65 bp, synthetic construct
  source 1..65: mol_type = other DNA
agagtgagtagtagtggagtagtacgcctcagtgttaaagtggtgagagtgagtagtagtggagt

SEQ ID NO: 78 - DNA, 65 bp, synthetic construct
  source 1..65: mol_type = other DNA
agagtgagtagtagtggagtagttccatgggtaaaccacttctggagagtgagtagtagtggagt

SEQ ID NO: 79 - DNA, 64 bp, synthetic construct
  source 1..64: mol_type = other DNA
agagtgagtagtagtggagtcgatccgcgaggataaccccaagtagagtgagtagtagtggagt

SEQ ID NO: 80 - DNA, 64 bp, synthetic construct
  source 1..64: mol_type = other DNA
agagtgagtagtagtggagtttccttctccgcgaggataacaggagagtgagtagtagtggagt

SEQ ID NO: 81 - DNA, 65 bp, synthetic construct
  source 1..65: mol_type = other DNA
tgtgatggaagttagagggtgaggctcagtagttttggatgctcatgtgatggaagttagagggt

SEQ ID NO: 82 - DNA, 65 bp, synthetic construct
  source 1..65: mol_type = other DNA
tgtgatggaagttagagggtagacgcgtcacttacgtgacacggctgtgatggaagttagagggt

SEQ ID NO: 83 - DNA, 64 bp, synthetic construct
  source 1..64: mol_type = other DNA
tgtgatggaagttagagggtgtggaggtgctggtaactaagctgtgtgatggaagttagagggt

SEQ ID NO: 84 - DNA, 66 bp, synthetic construct
  source 1..66: mol_type = other DNA
tgtgatggaagttagagggtctagttttatgggattagctccaggatgtgatggaagttagagggt

SEQ ID NO: 85 - DNA, 64 bp, synthetic construct
  source 1..64: mol_type = other DNA
tgtgatggaagttagagggtgaggaaagttctcagcatgtcttctgtgatggaagttagagggt

SEQ ID NO: 86 - DNA, 64 bp, synthetic construct
  source 1..64: mol_type = other DNA
tgtgatggaagttagagggtacacccatgctcggcacttctccctgtgatggaagttagagggt

SEQ ID NO: 87 - DNA, 64 bp, synthetic construct
  source 1..64: mol_type = other DNA
tgtgatggaagttagagggtcgcggtgtttttcacacccatacatgtgatggaagttagagggt

SEQ ID NO: 88 - DNA, 64 bp, synthetic construct
  source 1..64: mol_type = other DNA
tgtgatggaagttagagggttggccagagtgatacatgagggcgtgtgatggaagttagagggt

SEQ ID NO: 89 - DNA, 64 bp, synthetic construct
  source 1..64: mol_type = other DNA
tgtgatggaagttagagggttggctatctccgagcttgatttcgtgtgatggaagttagagggt

SEQ ID NO: 90 - DNA, 64 bp, synthetic construct
  source 1..64: mol_type = other DNA
tgtgatggaagttagagggtggcacacaggaaattccaccaaggtgtgatggaagttagagggt

SEQ ID NO: 91 - DNA, 64 bp, synthetic construct
  source 1..64: mol_type = other DNA
tgtgatggaagttagagggtaagatccaacttgctgaaccaggatgtgatggaagttagagggt

SEQ ID NO: 92 - DNA, 64 bp, synthetic construct
  source 1..64: mol_type = other DNA
tgtgatggaagttagagggttgcgtcacctaacaagtaggcaggtgtgatggaagttagagggt

SEQ ID NO: 93 - DNA, 66 bp, synthetic construct
  source 1..66: mol_type = other DNA
tgtgatggaagttagagggtcgtgtattaacttactgcccttcgagtgtgatggaagttagagggt

SEQ ID NO: 94 - DNA, 64 bp, synthetic construct
  source 1..64: mol_type = other DNA
tgtgatggaagttagagggtacaagacaaagtttctcgtgcaggtgtgatggaagttagagggt

SEQ ID NO: 95 - DNA, 64 bp, synthetic construct
  source 1..64: mol_type = other DNA
tgtgatggaagttagagggtaaacttcaaagatcctttcgccattgtgatggaagttagagggt

SEQ ID NO: 96 - DNA, 65 bp, synthetic construct
  source 1..65: mol_type = other DNA
tgtgatggaagttagagggtgcacgctaaaatcaatgaagctatttgtgatggaagttagagggt

SEQ ID NO: 97 - DNA, 64 bp, synthetic construct
  source 1..64: mol_type = other DNA
tgtgatggaagttagagggtcgatctgatagcgtgaggtccctttgtgatggaagttagagggt

SEQ ID NO: 98 - DNA, 67 bp, synthetic construct
  source 1..67: mol_type = other DNA
tgtgatggaagttagagggtataattcagtacaagatacctaggaattgtgatggaagttagagggt

SEQ ID NO: 99 - DNA, 64 bp, synthetic construct
  source 1..64: mol_type = other DNA
tgtgatggaagttagagggtaggcgctgaatccaggagcaacgatgtgatggaagttagagggt

SEQ ID NO: 100 - DNA, 64 bp, synthetic construct
  source 1..64: mol_type = other DNA
tgtgatggaagttagagggtcaaaacgctctatgatcgtcaatatgtgatggaagttagagggt

SEQ ID NO: 101 - DNA, 66 bp, synthetic construct
  source 1..66: mol_type = other DNA
tgtgatggaagttagagggtgcagtgtttttcacacccattgtgcatgtgatggaagttagagggt

SEQ ID NO: 102 - DNA, 64 bp, synthetic construct
  source 1..64: mol_type = other DNA
tgtgatggaagttagagggtctgcgatcggttttatgggatatctgtgatggaagttagagggt

SEQ ID NO: 103 - DNA, 64 bp, synthetic construct
  source 1..64: mol_type = other DNA
tgtgatggaagttagagggtggatcgacgtgtctgtctcgctcatgtgatggaagttagagggt

SEQ ID NO: 104 - DNA, 64 bp, synthetic construct
  source 1..64: mol_type = other DNA
tgtgatggaagttagagggtggtgcagtaaccagaagtacaccttgtgatggaagttagagggt

SEQ ID NO: 105 - DNA, 64 bp, synthetic construct
  source 1..64: mol_type = other DNA
tgtgatggaagttagagggtagttccaacttgctgaaccacgattgtgatggaagttagagggt

SEQ ID NO: 106 - DNA, 64 bp, synthetic construct
  source 1..64: mol_type = other DNA
tgaaaggaatgggttgtggtaaagagattagcttagcctcggcttgaaaggaatgggttgtggt

SEQ ID NO: 107 - DNA, 64 bp, synthetic construct
  source 1..64: mol_type = other DNA
tgaaaggaatgggttgtggtgtcctcacgatctgccttcgagcgtgaaaggaatgggttgtggt

SEQ ID NO: 108 - DNA, 64 bp, synthetic construct
  source 1..64: mol_type = other DNA
tgaaaggaatgggttgtggtttaacctaaaggtgtactccagtctgaaaggaatgggttgtggt

SEQ ID NO: 109 - DNA, 64 bp, synthetic construct
  source 1..64: mol_type = other DNA
tgaaaggaatgggttgtggttcgttgactcctcttcagactatgtgaaaggaatgggttgtggt

SEQ ID NO: 110 - DNA, 64 bp, synthetic construct
  source 1..64: mol_type = other DNA
tgaaaggaatgggttgtggttgaggctgatcgtatgatcaggtgtgaaaggaatgggttgtggt

SEQ ID NO: 111 - DNA, 64 bp, synthetic construct
  source 1..64: mol_type = other DNA
tgaaaggaatgggttgtggttctagcttagcctcgcgacttgcgtgaaaggaatgggttgtggt

SEQ ID NO: 112 - DNA, 66 bp, synthetic construct
  source 1..66: mol_type = other DNA
tgaaaggaatgggttgtggtacttttccaagtcattcgactatgactgaaaggaatgggttgtggt

SEQ ID NO: 113 - DNA, 66 bp, synthetic construct
  source 1..66: mol_type = other DNA
tgaaaggaatgggttgtggtgatgggtttttaccctctttgacacttgaaaggaatgggttgtggt

SEQ ID NO: 114 - DNA, 65 bp, synthetic construct
  source 1..65: mol_type = other DNA
tgaaaggaatgggttgtggttgatccaagtcattcgactatcacttgaaaggaatgggttgtggt

SEQ ID NO: 115 - DNA, 65 bp, synthetic construct
  source 1..65: mol_type = other DNA
tgaaaggaatgggttgtggtatgtcaagggatgaacagttacagatgaaaggaatgggttgtggt

SEQ ID NO: 116 - DNA, 65 bp, synthetic construct
  source 1..65: mol_type = other DNA
tgaaaggaatgggttgtggtgcaagggatgaacagttactctgtatgaaaggaatgggttgtggt

SEQ ID NO: 117 - DNA, 65 bp, synthetic construct
  source 1..65: mol_type = other DNA
tgaaaggaatgggttgtggtaggctaggtgtcttccacatttgcatgaaaggaatgggttgtggt

SEQ ID NO: 118 - DNA, 67 bp, synthetic construct
  source 1..67: mol_type = other DNA
tgaaaggaatgggttgtggtagtcgactatctgaaagaactacctattgaaaggaatgggttgtggt

SEQ ID NO: 119 - DNA, 68 bp, synthetic construct
  source 1..68: mol_type = other DNA
tgaaaggaatgggttgtggtgtaggttttgattgttatacggtatatctgaaaggaatgggttgtggt

SEQ ID NO: 120 - DNA, 66 bp, synthetic construct
  source 1..66: mol_type = other DNA
tgaaaggaatgggttgtggtatttcctattaaagatgttgggtaggtgaaaggaatgggttgtggt

SEQ ID NO: 121 - DNA, 64 bp, synthetic construct
  source 1..64: mol_type = other DNA
tgaaaggaatgggttgtggtcgtctccggtggaaaaagaaggcatgaaaggaatgggttgtggt

SEQ ID NO: 122 - DNA, 64 bp, synthetic construct
  source 1..64: mol_type = other DNA
tgaaaggaatgggttgtggtcaagcatggttacaggtgtatggatgaaaggaatgggttgtggt

SEQ ID NO: 123 - DNA, 64 bp, synthetic construct
  source 1..64: mol_type = other DNA
tgaaaggaatgggttgtggttatcctaaaggtgtactccactcgtgaaaggaatgggttgtggt

SEQ ID NO: 124 - DNA, 64 bp, synthetic construct
  source 1..64: mol_type = other DNA
tgaaaggaatgggttgtggtggacacagcttgtccttaagattttgaaaggaatgggttgtggt

SEQ ID NO: 125 - DNA, 64 bp, synthetic construct
  source 1..64: mol_type = other DNA
tgaaaggaatgggttgtggttgttccgatcgtctgcattccaattgaaaggaatgggttgtggt

SEQ ID NO: 126 - DNA, 66 bp, synthetic construct
  source 1..66: mol_type = other DNA
tgaaaggaatgggttgtggttcggtccttaagaaaagaagcataactgaaaggaatgggttgtggt

SEQ ID NO: 127 - DNA, 64 bp, synthetic construct
  source 1..64: mol_type = other DNA
tgaaaggaatgggttgtggtcgagacagacatttccgatcgagatgaaaggaatgggttgtggt

SEQ ID NO: 128 - DNA, 64 bp, synthetic construct
  source 1..64: mol_type = other DNA
tgaaaggaatgggttgtggtgacgctgatcgtatgatcagctggtgaaaggaatgggttgtggt

SEQ ID NO: 129 - DNA, 64 bp, synthetic construct
  source 1..64: mol_type = other DNA
tgaaaggaatgggttgtggtgcccgggccgctgttttctcagattgaaaggaatgggttgtggt

SEQ ID NO: 130 - DNA, 66 bp, synthetic construct
  source 1..66: mol_type = other DNA
tgaaaggaatgggttgtggtctttcggtactattatttccctcaggtgaaaggaatgggttgtggt

SEQ ID NO: 131 - DNA, 65 bp, synthetic construct
  source 1..65: mol_type = other DNA
ttggaggtgtagggagtaaacccacgattgttggtaacctgatcgttggaggtgtagggagtaaa

SEQ ID NO: 132 - DNA, 64 bp, synthetic construct
  source 1..64: mol_type = other DNA
ttggaggtgtagggagtaaatggagcattaagtgaccggataacttggaggtgtagggagtaaa

SEQ ID NO: 133 - DNA, 64 bp, synthetic construct
  source 1..64: mol_type = other DNA
ttggaggtgtagggagtaaactagcctaatcactctgcctagtattggaggtgtagggagtaaa

SEQ ID NO: 134 - DNA, 65 bp, synthetic construct
  source 1..65: mol_type = other DNA
ttggaggtgtagggagtaaaggtgcagttaccaccagtacggcttttggaggtgtagggagtaaa

SEQ ID NO: 135 - DNA, 64 bp, synthetic construct
  source 1..64: mol_type = other DNA
ttggaggtgtagggagtaaaagcgctacaacgtttcacttcactttggaggtgtagggagtaaa

SEQ ID NO: 136 - DNA, 67 bp, synthetic construct
  source 1..67: mol_type = other DNA
ttggaggtgtagggagtaaagacgtccacatttcatagtctccctggttggaggtgtagggagtaaa

SEQ ID NO: 137 - DNA, 65 bp, synthetic construct
  source 1..65: mol_type = other DNA
ttggaggtgtagggagtaaaaaagtcactcaaggtgacagggttcttggaggtgtagggagtaaa

SEQ ID NO: 138 - DNA, 64 bp, synthetic construct
  source 1..64: mol_type = other DNA
ttggaggtgtagggagtaaagaaccaccttagtggttcgtctagttggaggtgtagggagtaaa

SEQ ID NO: 139 - DNA, 64 bp, synthetic construct
  source 1..64: mol_type = other DNA
ttggaggtgtagggagtaaacaagggtacgattgttggtaaggattggaggtgtagggagtaaa

SEQ ID NO: 140 - DNA, 69 bp, synthetic construct
  source 1..69: mol_type = other DNA
ttggaggtgtagggagtaaaaagttaggtcactcaaggtgacagggttcttggaggtgtagggagtaaa

SEQ ID NO: 141 - DNA, 69 bp, synthetic construct
  source 1..69: mol_type = other DNA
ttggaggtgtagggagtaaagaaggtcactcaaggtgacagggaagtgattggaggtgtagggagtaaa

SEQ ID NO: 142 - DNA, 64 bp, synthetic construct
  source 1..64: mol_type = other DNA
ttggaggtgtagggagtaaagaaagttcccgccatcacgcggacttggaggtgtagggagtaaa

SEQ ID NO: 143 - DNA, 64 bp, synthetic construct
  source 1..64: mol_type = other DNA
ttggaggtgtagggagtaaagttgacttcacttaccgccaggcattggaggtgtagggagtaaa

SEQ ID NO: 144 - DNA, 64 bp, synthetic construct
  source 1..64: mol_type = other DNA
ttggaggtgtagggagtaaagaggcgcctgagtattctctaggattggaggtgtagggagtaaa

SEQ ID NO: 145 - DNA, 65 bp, synthetic construct
  source 1..65: mol_type = other DNA
ttggaggtgtagggagtaaataacctaatcactctgcctacaacgttggaggtgtagggagtaaa

SEQ ID NO: 146 - DNA, 64 bp, synthetic construct
  source 1..64: mol_type = other DNA
ttggaggtgtagggagtaaaccttgcctaatcactctgccttgtttggaggtgtagggagtaaa

SEQ ID NO: 147 - DNA, 66 bp, synthetic construct
  source 1..66: mol_type = other DNA
ttggaggtgtagggagtaaaccttgcctaatcactctgcctactacttggaggtgtagggagtaaa

SEQ ID NO: 148 - DNA, 66 bp, synthetic construct
  source 1..66: mol_type = other DNA
ttggaggtgtagggagtaaaggaatcgcagttaccaccagtaccccttggaggtgtagggagtaaa

SEQ ID NO: 149 - DNA, 64 bp, synthetic construct
  source 1..64: mol_type = other DNA
ttggaggtgtagggagtaaacgaggctccgtccgcaagggagaattggaggtgtagggagtaaa

SEQ ID NO: 150 - DNA, 65 bp, synthetic construct
  source 1..65: mol_type = other DNA
ttggaggtgtagggagtaaacgtggacttcacttaccgccaggcattggaggtgtagggagtaaa

SEQ ID NO: 151 - DNA, 64 bp, synthetic construct
  source 1..64: mol_type = other DNA
ttggaggtgtagggagtaaacccacgattgttggtaacctgttcttggaggtgtagggagtaaa

SEQ ID NO: 152 - DNA, 64 bp, synthetic construct
  source 1..64: mol_type = other DNA
ttggaggtgtagggagtaaagtgcagcattaagtgaccggaaaattggaggtgtagggagtaaa

SEQ ID NO: 153 - DNA, 64 bp, synthetic construct
  source 1..64: mol_type = other DNA
ttggaggtgtagggagtaaataacctaatcactctgcctactacttggaggtgtagggagtaaa

SEQ ID NO: 154 - DNA, 65 bp, synthetic construct
  source 1..65: mol_type = other DNA
ttggaggtgtagggagtaaagtacagttaccaccagtacgggttattggaggtgtagggagtaaa

SEQ ID NO: 155 - DNA, 64 bp, synthetic construct
  source 1..64: mol_type = other DNA
ttggaggtgtagggagtaaatagcgctacaacgtttcacttgacttggaggtgtagggagtaaa

SEQ ID NO: 156 - DNA, 64 bp, synthetic construct
  source 1..64: mol_type = other DNA
agggtgtgtttgtaaagggtcgtacgcaaagcgaaacgcttaccagggtgtgtttgtaaagggt

SEQ ID NO: 157 - DNA, 64 bp, synthetic construct
  source 1..64: mol_type = other DNA
agggtgtgtttgtaaagggtccattaacctcactcccttccaggagggtgtgtttgtaaagggt

SEQ ID NO: 158 - DNA, 65 bp, synthetic construct
  source 1..65: mol_type = other DNA
agggtgtgtttgtaaagggtcagtcatgctgtcgttacgcataaaagggtgtgtttgtaaagggt

SEQ ID NO: 159 - DNA, 64 bp, synthetic construct
  source 1..64: mol_type = other DNA
agggtgtgtttgtaaagggtgtaccggctgtaacggttcattagagggtgtgtttgtaaagggt

SEQ ID NO: 160 - DNA, 64 bp, synthetic construct
  source 1..64: mol_type = other DNA
agggtgtgtttgtaaagggtaaggacccttaaagggtcaggctcagggtgtgtttgtaaagggt

SEQ ID NO: 161 - DNA, 64 bp, synthetic construct
  source 1..64: mol_type = other DNA
agggtgtgtttgtaaagggtgaaggacccttaaagggtcagcctagggtgtgtttgtaaagggt

SEQ ID NO: 162 - DNA, 64 bp, synthetic construct
  source 1..64: mol_type = other DNA
agggtgtgtttgtaaagggtgtgcagcgttagtaacgttcccctagggtgtgtttgtaaagggt

SEQ ID NO: 163 - DNA, 64 bp, synthetic construct
  source 1..64: mol_type = other DNA
agggtgtgtttgtaaagggtttcgcttcacctaccatcagccacagggtgtgtttgtaaagggt

SEQ ID NO: 164 - DNA, 65 bp, synthetic construct
  source 1..65: mol_type = other DNA
agggtgtgtttgtaaagggtgtcttagtaacgttccggattttggagggtgtgtttgtaaagggt

SEQ ID NO: 165 - DNA, 64 bp, synthetic construct
  source 1..64: mol_type = other DNA
agggtgtgtttgtaaagggtgcagtaacgttccggatttacgacagggtgtgtttgtaaagggt

SEQ ID NO: 166 - DNA, 64 bp, synthetic construct
  source 1..64: mol_type = other DNA
agggtgtgtttgtaaagggtgcgtttgcgcaccacgcaaaggctagggtgtgtttgtaaagggt

SEQ ID NO: 167 - DNA, 65 bp, synthetic construct
  source 1..65: mol_type = other DNA
agggtgtgtttgtaaagggtcaaccgtccatcatgctgtcgtatgagggtgtgtttgtaaagggt

SEQ ID NO: 168 - DNA, 64 bp, synthetic construct
  source 1..64: mol_type = other DNA
agggtgtgtttgtaaagggtcgacgttacgcattttgcgcaggtagggtgtgtttgtaaagggt

SEQ ID NO: 169 - DNA, 66 bp, synthetic construct
  source 1..66: mol_type = other DNA
agggtgtgtttgtaaagggtagtcctcagcgttagtaacgttcgccagggtgtgtttgtaaagggt

SEQ ID NO: 170 - DNA, 64 bp, synthetic construct
  source 1..64: mol_type = other DNA
agggtgtgtttgtaaagggtaacttcccgaccgaatcgctgcgtagggtgtgtttgtaaagggt

SEQ ID NO: 171 - DNA, 64 bp, synthetic construct
  source 1..64: mol_type = other DNA
agggtgtgtttgtaaagggtactctccgttaaccgtccatctacagggtgtgtttgtaaagggt

SEQ ID NO: 172 - DNA, 64 bp, synthetic construct
  source 1..64: mol_type = other DNA
agggtgtgtttgtaaagggtggcaaccgtccatcatgctgtgcaagggtgtgtttgtaaagggt

SEQ ID NO: 173 - DNA, 64 bp, synthetic construct
  source 1..64: mol_type = other DNA
agggtgtgtttgtaaagggtggtccaaaacgctccactgccactagggtgtgtttgtaaagggt

SEQ ID NO: 174 - DNA, 65 bp, synthetic construct
  source 1..65: mol_type = other DNA
agggtgtgtttgtaaagggtgtatgctgtcgttacgcattttcgcagggtgtgtttgtaaagggt

SEQ ID NO: 175 - DNA, 64 bp, synthetic construct
  source 1..64: mol_type = other DNA
agggtgtgtttgtaaagggtgcaaccgtccatcatgctgtccaaagggtgtgtttgtaaagggt

SEQ ID NO: 176 - DNA, 64 bp, synthetic construct
  source 1..64: mol_type = other DNA
agggtgtgtttgtaaagggtcgaactgcctgatttttgacgaacagggtgtgtttgtaaagggt

SEQ ID NO: 177 - DNA, 66 bp, synthetic construct
  source 1..66: mol_type = other DNA
agggtgtgtttgtaaagggtgcgcacgcaaagcgaaacgctttccaagggtgtgtttgtaaagggt

SEQ ID NO: 178 - DNA, 69 bp, synthetic construct
  source 1..69: mol_type = other DNA
agggtgtgtttgtaaagggtcatgtcaatgaataaggttattaaccagtagggtgtgtttgtaaagggt

SEQ ID NO: 179 - DNA, 64 bp, synthetic construct
  source 1..64: mol_type = other DNA
agggtgtgtttgtaaagggtcagtcatgctgtcgttacgcaaaaagggtgtgtttgtaaagggt

SEQ ID NO: 180 - DNA, 64 bp, synthetic construct
  source 1..64: mol_type = other DNA
agggtgtgtttgtaaagggttgtgccggctgtaacggttcaataagggtgtgtttgtaaagggt

SEQ ID NO: 181 - DNA, 64 bp, synthetic construct
  source 1..64: mol_type = other DNA
aggttaggttgagaataggatgggtcgcttaaagcgacaggataaggttaggttgagaatagga

SEQ ID NO: 182 - DNA, 64 bp, synthetic construct
  source 1..64: mol_type = other DNA
aggttaggttgagaataggagaagtccgtagacattatgcgcataggttaggttgagaatagga

SEQ ID NO: 183 - DNA, 64 bp, synthetic construct
  source 1..64: mol_type = other DNA
aggttaggttgagaataggatgcccccgacccagtttatggcggaggttaggttgagaatagga

SEQ ID NO: 184 - DNA, 65 bp, synthetic construct
  source 1..65: mol_type = other DNA
aggttaggttgagaataggagaaggtcgcttaaagcgacaggcttaggttaggttgagaatagga

SEQ ID NO: 185 - DNA, 65 bp, synthetic construct
  source 1..65: mol_type = other DNA
aggttaggttgagaataggaaagttaggtcgcttaaagcgactccaggttaggttgagaatagga

SEQ ID NO: 186 - DNA, 64 bp, synthetic construct
  source 1..64: mol_type = other DNA
aggttaggttgagaataggagctcagtttatgggcctaggtatcaggttaggttgagaatagga

SEQ ID NO: 187 - DNA, 64 bp, synthetic construct
  source 1..64: mol_type = other DNA
aggttaggttgagaataggatccgcttaaagcgacagggaactgaggttaggttgagaatagga

SEQ ID NO: 188 - DNA, 69 bp, synthetic construct
  source 1..69: mol_type = other DNA
aggttaggttgagaataggaaagttaggtcgcttaaagcgacagggttcaggttaggttgagaatagga

SEQ ID NO: 189 - DNA, 69 bp, synthetic construct
  source 1..69: mol_type = other DNA
aggttaggttgagaataggaggaaggtcgcttaaagcgacagggaactgaggttaggttgagaatagga

SEQ ID NO: 190 - DNA, 64 bp, synthetic construct
  source 1..64: mol_type = other DNA
aggttaggttgagaataggaggaaggtcgcttaaagcgacacccaggttaggttgagaatagga

SEQ ID NO: 191 - DNA, 64 bp, synthetic construct
  source 1..64: mol_type = other DNA
aggttaggttgagaataggaaaagttcccaccattacgtgcaccaggttaggttgagaatagga

SEQ ID NO: 192 - DNA, 69 bp, synthetic construct
  source 1..69: mol_type = other DNA
aggttaggttgagaataggacaatttaggtcgcttaaagcgacaggcttaggttaggttgagaatagga

SEQ ID NO: 193 - DNA, 65 bp, synthetic construct
  source 1..65: mol_type = other DNA
aggttaggttgagaataggactgagtttatgggcctaggttacttaggttaggttgagaatagga

SEQ ID NO: 194 - DNA, 64 bp, synthetic construct
  source 1..64: mol_type = other DNA
aggttaggttgagaataggaggcccagtttatgggcctaggaataggttaggttgagaatagga

SEQ ID NO: 195 - DNA, 64 bp, synthetic construct
  source 1..64: mol_type = other DNA
aggttaggttgagaataggagaaggtcgcttaaagcgacagcctaggttaggttgagaatagga

SEQ ID NO: 196 - DNA, 64 bp, synthetic construct
  source 1..64: mol_type = other DNA
aggttaggttgagaataggaccacttaaagcgacagggaagtgaaggttaggttgagaatagga

SEQ ID NO: 197 - DNA, 64 bp, synthetic construct
  source 1..64: mol_type = other DNA
aggttaggttgagaataggaacttcccaccattacgtgctgcgtaggttaggttgagaatagga

SEQ ID NO: 198 - DNA, 69 bp, synthetic construct
  source 1..69: mol_type = other DNA
aggttaggttgagaataggagaaggtcgcttaaagcgacagggaagtgaaggttaggttgagaatagga

SEQ ID NO: 199 - DNA, 64 bp, synthetic construct
  source 1..64: mol_type = other DNA
aggttaggttgagaataggaaattcgcttaaagcgacagggttcaggttaggttgagaatagga

SEQ ID NO: 200 - DNA, 64 bp, synthetic construct
  source 1..64: mol_type = other DNA
aggttaggttgagaataggaaacttcccaccattacgtgctccgaggttaggttgagaatagga

SEQ ID NO: 201 - DNA, 64 bp, synthetic construct
  source 1..64: mol_type = other DNA
aggttaggttgagaataggaggaacccagtttatgggcctaccaaggttaggttgagaatagga

SEQ ID NO: 202 - DNA, 65 bp, synthetic construct
  source 1..65: mol_type = other DNA
aggttaggttgagaataggaaaagtcgcttaaagcgacagggttcaggttaggttgagaatagga

SEQ ID NO: 203 - DNA, 67 bp, synthetic construct
  source 1..67: mol_type = other DNA
aggttaggttgagaataggacagcgacccagtttatgggcctagcaaaggttaggttgagaatagga

SEQ ID NO: 204 - DNA, 64 bp, synthetic construct
  source 1..64: mol_type = other DNA
aggttaggttgagaataggactgagtttatgggcctaggtttctaggttaggttgagaatagga

SEQ ID NO: 205 - DNA, 66 bp, synthetic construct
  source 1..66: mol_type = other DNA
aggttaggttgagaataggagctcagtttatgggcctaggttacttaggttaggttgagaatagga

SEQ ID NO: 206 - DNA, 67 bp, synthetic construct
  source 1..67: mol_type = other DNA
tagagttgatagagggagaacgaatgagtaaatcacttcacctagtatagagttgatagagggagaa

SEQ ID NO: 207 - DNA, 67 bp, synthetic construct
  source 1..67: mol_type = other DNA
tagagttgatagagggagaaggattcgcttcattacgctatgtaaagtagagttgatagagggagaa

SEQ ID NO: 208 - DNA, 66 bp, synthetic construct
  source 1..66: mol_type = other DNA
tagagttgatagagggagaatgttcagcgttaaaaaggtaccgctatagagttgatagagggagaa

SEQ ID NO: 209 - DNA, 66 bp, synthetic construct
  source 1..66: mol_type = other DNA
tagagttgatagagggagaaccagcttcattacgctatgtattgtgtagagttgatagagggagaa

SEQ ID NO: 210 - DNA, 65 bp, synthetic construct
  source 1..65: mol_type = other DNA
tagagttgatagagggagaatgttcagcgttaaaaaggtaccccttagagttgatagagggagaa

SEQ ID NO: 211 - DNA, 65 bp, synthetic construct
  source 1..65: mol_type = other DNA
tagagttgatagagggagaagcccgcttcattacgctatgtaaagtagagttgatagagggagaa

SEQ ID NO: 212 - DNA, 65 bp, synthetic construct
  source 1..65: mol_type = other DNA
tagagttgatagagggagaagcgcccgggtaacgggtccacgaattagagttgatagagggagaa

SEQ ID NO: 213 - DNA, 65 bp, synthetic construct
  source 1..65: mol_type = other DNA
tagagttgatagagggagaagtgcagcgttaaaaaggtaccgctatagagttgatagagggagaa

SEQ ID NO: 214 - DNA, 65 bp, synthetic construct
  source 1..65: mol_type = other DNA
tagagttgatagagggagaaggattcgcttcattacgctatgatatagagttgatagagggagaa

SEQ ID NO: 215 - DNA, 64 bp, synthetic construct
  source 1..64: mol_type = other DNA
tagagttgatagagggagaagcgcccgggtaacgggtccaccaatagagttgatagagggagaa

SEQ ID NO: 216 - DNA, 64 bp, synthetic construct
  source 1..64: mol_type = other DNA
tagagttgatagagggagaatggagcgttaaaaaggtaccgctatagagttgatagagggagaa

SEQ ID NO: 217 - DNA, 68 bp, synthetic construct
  source 1..68: mol_type = other DNA
tagagttgatagagggagaaggagttcgcttcattacgctatgtaaagtagagttgatagagggagaa

SEQ ID NO: 218 - DNA, 67 bp, synthetic construct
  source 1..67: mol_type = other DNA
tagagttgatagagggagaaggctcgcttcattacgctatgtatagttagagttgatagagggagaa

SEQ ID NO: 219 - DNA, 64 bp, synthetic construct
  source 1..64: mol_type = other DNA
tagagttgatagagggagaacgtccgggtaacgggtccacgaattagagttgatagagggagaa

SEQ ID NO: 220 - DNA, 65 bp, synthetic construct
  source 1..65: mol_type = other DNA
tagagttgatagagggagaaaattcaatgtatcgctacactttgttagagttgatagagggagaa

SEQ ID NO: 221 - DNA, 66 bp, synthetic construct
  source 1..66: mol_type = other DNA
tagagttgatagagggagaacgaatgagtaaatcacttcaccttgttagagttgatagagggagaa

SEQ ID NO: 222 - DNA, 64 bp, synthetic construct
  source 1..64: mol_type = other DNA
tagagttgatagagggagaagtgcagcgttaaaaaggtaccccttagagttgatagagggagaa

SEQ ID NO: 223 - DNA, 65 bp, synthetic construct
  source 1..65: mol_type = other DNA
tagagttgatagagggagaaggctcgcttcattacgctatgttaatagagttgatagagggagaa

SEQ ID NO: 224 - DNA, 64 bp, synthetic construct
  source 1..64: mol_type = other DNA
tagagttgatagagggagaagaggcatacctcacgatacacgaatagagttgatagagggagaa

SEQ ID NO: 225 - DNA, 67 bp, synthetic construct
  source 1..67: mol_type = other DNA
tagagttgatagagggagaaggagttcgcttcattacgctatgttaatagagttgatagagggagaa

SEQ ID NO: 226 - DNA, 69 bp, synthetic construct
  source 1..69: mol_type = other DNA
tagagttgatagagggagaaggattcgcttcattacgctatgtattgtgtagagttgatagagggagaa

SEQ ID NO: 227 - DNA, 65 bp, synthetic construct
  source 1..65: mol_type = other DNA
tagagttgatagagggagaaggagttcgcttcattacgctatcattagagttgatagagggagaa

SEQ ID NO: 228 - DNA, 67 bp, synthetic construct
  source 1..67: mol_type = other DNA
tagagttgatagagggagaagcccgcttcattacgctatgtattgtgtagagttgatagagggagaa

SEQ ID NO: 229 - DNA, 68 bp, synthetic construct
  source 1..68: mol_type = other DNA
tagagttgatagagggagaaggctcgcttcattacgctatgtattgtgtagagttgatagagggagaa

SEQ ID NO: 230 - DNA, 66 bp, synthetic construct
  source 1..66: mol_type = other DNA
tagagttgatagagggagaaggctcgcttcattacgctatgtaaagtagagttgatagagggagaa

SEQ ID NO: 231 - DNA, 64 bp, synthetic construct
  source 1..64: mol_type = other DNA
gatgatgtagtagtaagggtacctcttcgactggtctcagcagggatgatgtagtagtaagggt

SEQ ID NO: 232 - DNA, 67 bp, synthetic construct
  source 1..67: mol_type = other DNA
gatgatgtagtagtaagggttgcaatcgatgaggttattaacctgtagatgatgtagtagtaagggt

SEQ ID NO: 233 - DNA, 66 bp, synthetic construct
  source 1..66: mol_type = other DNA
gatgatgtagtagtaagggtcatcagtcacacccgaaggtgctagggatgatgtagtagtaagggt

SEQ ID NO: 234 - DNA, 66 bp, synthetic construct
  source 1..66: mol_type = other DNA
gatgatgtagtagtaagggtgcaatcgatgaggttattaacctgtagatgatgtagtagtaagggt

SEQ ID NO: 235 - DNA, 65 bp, synthetic construct
  source 1..65: mol_type = other DNA
gatgatgtagtagtaagggtcatcagtcacacccgaaggtgcagggatgatgtagtagtaagggt

SEQ ID NO: 236 - DNA, 65 bp, synthetic construct
  source 1..65: mol_type = other DNA
gatgatgtagtagtaagggtatgagtcacacccgaaggtgctagggatgatgtagtagtaagggt

SEQ ID NO: 237 - DNA, 65 bp, synthetic construct
  source 1..65: mol_type = other DNA
gatgatgtagtagtaagggttcccttcacctacacaccagcgacggatgatgtagtagtaagggt

SEQ ID NO: 238 - DNA, 64 bp, synthetic construct
  source 1..64: mol_type = other DNA
gatgatgtagtagtaagggttcccttcacctacacaccagccacgatgatgtagtagtaagggt

SEQ ID NO: 239 - DNA, 64 bp, synthetic construct
  source 1..64: mol_type = other DNA
gatgatgtagtagtaagggttgaccgcaaccccggtgagggcgggatgatgtagtagtaagggt

SEQ ID NO: 240 - DNA, 64 bp, synthetic construct
  source 1..64: mol_type = other DNA
gatgatgtagtagtaagggtagagactggtctcagctccacggcgatgatgtagtagtaagggt

SEQ ID NO: 241 - DNA, 64 bp, synthetic construct
  source 1..64: mol_type = other DNA
gatgatgtagtagtaagggtatgagtcacacccgaaggtgcagggatgatgtagtagtaagggt

SEQ ID NO: 242 - DNA, 64 bp, synthetic construct
  source 1..64: mol_type = other DNA
gatgatgtagtagtaagggttgcgtcacacccgaaggtgctagggatgatgtagtagtaagggt

SEQ ID NO: 243 - DNA, 64 bp, synthetic construct
  source 1..64: mol_type = other DNA
gatgatgtagtagtaagggtgtgctcagccttgattatccgctagatgatgtagtagtaagggt

SEQ ID NO: 244 - DNA, 64 bp, synthetic construct
  source 1..64: mol_type = other DNA
gatgatgtagtagtaagggtccacgtcaatcgatgaggttaaatgatgatgtagtagtaagggt

SEQ ID NO: 245 - DNA, 64 bp, synthetic construct
  source 1..64: mol_type = other DNA
gatgatgtagtagtaagggtaataacctcatcgccttcctcagggatgatgtagtagtaagggt

SEQ ID NO: 246 - DNA, 64 bp, synthetic construct
  source 1..64: mol_type = other DNA
gatgatgtagtagtaagggtcccacgtcaatcgatgaggtttaagatgatgtagtagtaagggt

SEQ ID NO: 247 - DNA, 64 bp, synthetic construct
  source 1..64: mol_type = other DNA
gatgatgtagtagtaagggtcatcagtcacacccgaaggtggaggatgatgtagtagtaagggt

SEQ ID NO: 248 - DNA, 64 bp, synthetic construct
  source 1..64: mol_type = other DNA
gatgatgtagtagtaagggtcccttcacctacacaccagcgacggatgatgtagtagtaagggt

SEQ ID NO: 249 - DNA, 64 bp, synthetic construct
  source 1..64: mol_type = other DNA
ataggaaatggtggtagtgtctaccgaccgtgattagctaaggatgtggagggattgaaggata

SEQ ID NO: 250 - DNA, 65 bp, synthetic construct
  source 1..65: mol_type = other DNA
ataggaaatggtggtagtgtcaactggagcttagaggattttggatgtggagggattgaaggata

SEQ ID NO: 251 - DNA, 64 bp, synthetic construct
  source 1..64: mol_type = other DNA
ataggaaatggtggtagtgtcccttaaaggcccagggaagagagtgtggagggattgaaggata

SEQ ID NO: 252 - DNA, 64 bp, synthetic construct
  source 1..64: mol_type = other DNA
ataggaaatggtggtagtgtaagcgcttatcttttccgcacaattgtggagggattgaaggata

SEQ ID NO: 253 - DNA, 64 bp, synthetic construct
  source 1..64: mol_type = other DNA
ataggaaatggtggtagtgtcccttcacctacatgccagcgacgtgtggagggattgaaggata

SEQ ID NO: 254 - DNA, 64 bp, synthetic construct
  source 1..64: mol_type = other DNA
ataggaaatggtggtagtgtctgtgtcctcaccccagattaacctgtggagggattgaaggata

SEQ ID NO: 255 - DNA, 65 bp, synthetic construct
  source 1..65: mol_type = other DNA
ataggaaatggtggtagtgtatgtttaatgttacctggagctatctgtggagggattgaaggata

SEQ ID NO: 256 - DNA, 65 bp, synthetic construct
  source 1..65: mol_type = other DNA
ataggaaatggtggtagtgttccatcaactacttctgcaccgatctgtggagggattgaaggata

SEQ ID NO: 257 - DNA, 64 bp, synthetic construct
  source 1..64: mol_type = other DNA
ataggaaatggtggtagtgtgcgcagggttgatatgcaaccccttgtggagggattgaaggata

SEQ ID NO: 258 - DNA, 64 bp, synthetic construct
  source 1..64: mol_type = other DNA
ataggaaatggtggtagtgtgatcaacaacgctaagcgtcggactgtggagggattgaaggata

SEQ ID NO: 259 - DNA, 64 bp, synthetic construct
  source 1..64: mol_type = other DNA
ataggaaatggtggtagtgtagttccatccgcgagggacttgtgtgtggagggattgaaggata

SEQ ID NO: 260 - DNA, 65 bp, synthetic construct
  source 1..65: mol_type = other DNA
ataggaaatggtggtagtgttaatgaacgtattaagctcacctggtgtggagggattgaaggata

SEQ ID NO: 261 - DNA, 66 bp, synthetic construct
  source 1..66: mol_type = other DNA
ataggaaatggtggtagtgtgtccatcaactacttctgcaccgatctgtggagggattgaaggata

SEQ ID NO: 262 - DNA, 64 bp, synthetic construct
  source 1..64: mol_type = other DNA
ataggaaatggtggtagtgtataccctttgctgcgcgacttaggtgtggagggattgaaggata

SEQ ID NO: 263 - DNA, 64 bp, synthetic construct
  source 1..64: mol_type = other DNA
ataggaaatggtggtagtgtcagtaccttgcaactaatcgcggttgtggagggattgaaggata

SEQ ID NO: 264 - DNA, 67 bp, synthetic construct
  source 1..67: mol_type = other DNA
ataggaaatggtggtagtgtcagttgatgaacgtattaagctcaggttgtggagggattgaaggata

SEQ ID NO: 265 - DNA, 64 bp, synthetic construct
  source 1..64: mol_type = other DNA
ataggaaatggtggtagtgttatcagacaggatgtcacgtgaggtgtggagggattgaaggata

SEQ ID NO: 266 - DNA, 65 bp, synthetic construct
  source 1..65: mol_type = other DNA
ataggaaatggtggtagtgtgatcatcgaactcacgacctgtcgttgtggagggattgaaggata

SEQ ID NO: 267 - DNA, 64 bp, synthetic construct
  source 1..64: mol_type = other DNA
ataggaaatggtggtagtgttgtagccgattcaggttctggcgatgtggagggattgaaggata

SEQ ID NO: 268 - DNA, 67 bp, synthetic construct
  source 1..67: mol_type = other DNA
ataggaaatggtggtagtgtataattcatgacatgataatgtgtgcttgtggagggattgaaggata

SEQ ID NO: 269 - DNA, 64 bp, synthetic construct
  source 1..64: mol_type = other DNA
ataggaaatggtggtagtgtataggcagtgtcctactctcggtatgtggagggattgaaggata

SEQ ID NO: 270 - DNA, 64 bp, synthetic construct
  source 1..64: mol_type = other DNA
ataggaaatggtggtagtgtaatgggccgagttagaacatcttttgtggagggattgaaggata

SEQ ID NO: 271 - DNA, 64 bp, synthetic construct
  source 1..64: mol_type = other DNA
ataggaaatggtggtagtgtaaagcgcttatcttttccgcagaatgtggagggattgaaggata

SEQ ID NO: 272 - DNA, 64 bp, synthetic construct
  source 1..64: mol_type = other DNA
ataggaaatggtggtagtgtaaagggccttaaaggcccaggctttgtggagggattgaaggata

SEQ ID NO: 273 - DNA, 64 bp, synthetic construct
  source 1..64: mol_type = other DNA
ataggaaatggtggtagtgttccccttaaaggcccagggaactgtgtggagggattgaaggata

SEQ ID NO: 274 - DNA, 66 bp, synthetic construct
  source 1..66: mol_type = other DNA
agagtgagtagtagtggagtccccgattcctgtgtaactgaaggaatgtggagggattgaaggata

SEQ ID NO: 275 - DNA, 68 bp, synthetic construct
  source 1..68: mol_type = other DNA
agagtgagtagtagtggagtggacacgtatacaaagtatacatcccgttgtggagggattgaaggata

SEQ ID NO: 276 - DNA, 64 bp, synthetic construct
  source 1..64: mol_type = other DNA
agagtgagtagtagtggagtacggcaagtaaggaaaagggtacgtgtggagggattgaaggata

SEQ ID NO: 277 - DNA, 66 bp, synthetic construct
  source 1..66: mol_type = other DNA
agagtgagtagtagtggagtacgcacctgtatctagattcccgttctgtggagggattgaaggata

SEQ ID NO: 278 - DNA, 65 bp, synthetic construct
  source 1..65: mol_type = other DNA
agagtgagtagtagtggagtaccgtctggattgttttcctctacttgtggagggattgaaggata

SEQ ID NO: 279 - DNA, 67 bp, synthetic construct
  source 1..67: mol_type = other DNA
agagtgagtagtagtggagtagacggatagtactcataggtattgcctgtggagggattgaaggata

SEQ ID NO: 280 - DNA, 66 bp, synthetic construct
  source 1..66: mol_type = other DNA
agagtgagtagtagtggagtgaaagttcccatccgaaatgctgcgttgtggagggattgaaggata

SEQ ID NO: 281 - DNA, 65 bp, synthetic construct
  source 1..65: mol_type = other DNA
agagtgagtagtagtggagtcgagccactaaagcctcaaaggaggtgtggagggattgaaggata

SEQ ID NO: 282 - DNA, 67 bp, synthetic construct
  source 1..67: mol_type = other DNA
agagtgagtagtagtggagtgagcgtcagtattaggccagatgggactgtggagggattgaaggata

SEQ ID NO: 283 - DNA, 65 bp, synthetic construct
  source 1..65: mol_type = other DNA
agagtgagtagtagtggagttgggaattctaccatcctctccgtatgtggagggattgaaggata

SEQ ID NO: 284 - DNA, 64 bp, synthetic construct
  source 1..64: mol_type = other DNA
agagtgagtagtagtggagtggtctctcccatactctagctgtgtgtggagggattgaaggata

SEQ ID NO: 285 - DNA, 64 bp, synthetic construct
  source 1..64: mol_type = other DNA
agagtgagtagtagtggagttccgttcactcttgctatggtgcgtgtggagggattgaaggata

SEQ ID NO: 286 - DNA, 67 bp, synthetic construct
  source 1..67: mol_type = other DNA
agagtgagtagtagtggagtggatattcagacaaggtttcacgtcggtgtggagggattgaaggata

SEQ ID NO: 287 - DNA, 67 bp, synthetic construct
  source 1..67: mol_type = other DNA
agagtgagtagtagtggagtagagtattaactaaagtagcctccaggtgtggagggattgaaggata

SEQ ID NO: 288 - DNA, 64 bp, synthetic construct
  source 1..64: mol_type = other DNA
agagtgagtagtagtggagtgtatcagacaaggtttcacgtcggtgtggagggattgaaggata

SEQ ID NO: 289 - DNA, 64 bp, synthetic construct
  source 1..64: mol_type = other DNA
agagtgagtagtagtggagttgatcatcattatgtgtgcccaaatgtggagggattgaaggata

SEQ ID NO: 290 - DNA, 69 bp, synthetic construct
  source 1..69: mol_type = other DNA
agagtgagtagtagtggagtagataaaacacacataacttaatgggaactgtggagggattgaaggata

SEQ ID NO: 291 - DNA, 64 bp, synthetic construct
  source 1..64: mol_type = other DNA
agagtgagtagtagtggagtgaagctcatctattagcgcaaccatgtggagggattgaaggata

SEQ ID NO: 292 - DNA, 66 bp, synthetic construct
  source 1..66: mol_type = other DNA
agagtgagtagtagtggagtataattcatgttgcaatacctacgaatgtggagggattgaaggata

SEQ ID NO: 293 - DNA, 65 bp, synthetic construct
  source 1..65: mol_type = other DNA
agagtgagtagtagtggagtcagccgctaggtccggtagcaacgatgtggagggattgaaggata

SEQ ID NO: 294 - DNA, 64 bp, synthetic construct
  source 1..64: mol_type = other DNA
agagtgagtagtagtggagtgtcggttcactcttgctatggagctgtggagggattgaaggata

SEQ ID NO: 295 - DNA, 64 bp, synthetic construct
  source 1..64: mol_type = other DNA
agagtgagtagtagtggagtaaagattagcatcacatcgctcactgtggagggattgaaggata

SEQ ID NO: 296 - DNA, 64 bp, synthetic construct
  source 1..64: mol_type = other DNA
agagtgagtagtagtggagttaagactcgatttctctacgggagtgtggagggattgaaggata

SEQ ID NO: 297 - DNA, 65 bp, synthetic construct
  source 1..65: mol_type = other DNA
agagtgagtagtagtggagtggcctctttgcagttaggctaggattgtggagggattgaaggata

SEQ ID NO: 298 - DNA, 64 bp, synthetic construct
  source 1..64: mol_type = other DNA
agagtgagtagtagtggagttcttcagcatagagtaccccgctatgtggagggattgaaggata

SEQ ID NO: 299 - DNA, 64 bp, synthetic construct
  source 1..64: mol_type = other DNA
agagtgagtagtagtggagtaggtcgtctggtttagttagcgatataggaaatggtggtagtgt

SEQ ID NO: 300 - DNA, 69 bp, synthetic construct
  source 1..69: mol_type = other DNA
agagtgagtagtagtggagtggaatcactatatactctagtacaggttaataggaaatggtggtagtgt

SEQ ID NO: 301 - DNA, 64 bp, synthetic construct
  source 1..64: mol_type = other DNA
agagtgagtagtagtggagtccgcccgttatcataggctccatgataggaaatggtggtagtgt

SEQ ID NO: 302 - DNA, 65 bp, synthetic construct
  source 1..65: mol_type = other DNA
agagtgagtagtagtggagtaggactgagattggctttaagactaataggaaatggtggtagtgt

SEQ ID NO: 303 - DNA, 67 bp, synthetic construct
  source 1..67: mol_type = other DNA
agagtgagtagtagtggagtaaaggtctacaacatgatactatgcgcataggaaatggtggtagtgt

SEQ ID NO: 304 - DNA, 64 bp, synthetic construct
  source 1..64: mol_type = other DNA
agagtgagtagtagtggagtaggccatgacacttttgtgtctagataggaaatggtggtagtgt

SEQ ID NO: 305 - DNA, 64 bp, synthetic construct
  source 1..64: mol_type = other DNA
agagtgagtagtagtggagttacacttttgtgtcatccacacgaataggaaatggtggtagtgt

SEQ ID NO: 306 - DNA, 66 bp, synthetic construct
  source 1..66: mol_type = other DNA
agagtgagtagtagtggagttgcctctttgaatgaatagctgcaagataggaaatggtggtagtgt

SEQ ID NO: 307 - DNA, 65 bp, synthetic construct
  source 1..65: mol_type = other DNA
agagtgagtagtagtggagtacgcgaagagaaagcctatctcatcataggaaatggtggtagtgt

SEQ ID NO: 308 - DNA, 65 bp, synthetic construct
  source 1..65: mol_type = other DNA
agagtgagtagtagtggagtttatctggtttagttagcctacacgataggaaatggtggtagtgt

SEQ ID NO: 309 - DNA, 67 bp, synthetic construct
  source 1..67: mol_type = other DNA
agagtgagtagtagtggagtcctttatctgagattggtaatccgcctataggaaatggtggtagtgt

SEQ ID NO: 310 - DNA, 67 bp, synthetic construct
  source 1..67: mol_type = other DNA
agagtgagtagtagtggagtgattccaagagacttaacatcgaccgaataggaaatggtggtagtgt

SEQ ID NO: 311 - DNA, 64 bp, synthetic construct
  source 1..64: mol_type = other DNA
agagtgagtagtagtggagtggtagtcatccaagcacttttgttataggaaatggtggtagtgt

SEQ ID NO: 312 - DNA, 64 bp, synthetic construct
  source 1..64: mol_type = other DNA
agagtgagtagtagtggagtggaaagtcatccaagcactttagtataggaaatggtggtagtgt

SEQ ID NO: 313 - DNA, 65 bp, synthetic construct
  source 1..65: mol_type = other DNA
agagtgagtagtagtggagtaaaaaagcgtacaatggttaagggtataggaaatggtggtagtgt

SEQ ID NO: 314 - DNA, 64 bp, synthetic construct
  source 1..64: mol_type = other DNA
agagtgagtagtagtggagtaaggcgttctagggcttaactagaataggaaatggtggtagtgt

SEQ ID NO: 315 - DNA, 64 bp, synthetic construct
  source 1..64: mol_type = other DNA
agagtgagtagtagtggagttaacgggctcgaacttgttgttccataggaaatggtggtagtgt

SEQ ID NO: 316 - DNA, 66 bp, synthetic construct
  source 1..66: mol_type = other DNA
agagtgagtagtagtggagtaatgtcacttggtagattttccagagataggaaatggtggtagtgt

SEQ ID NO: 317 - DNA, 64 bp, synthetic construct
  source 1..64: mol_type = other DNA
agagtgagtagtagtggagtggtcctaccaacgttcttctcattataggaaatggtggtagtgt

SEQ ID NO: 318 - DNA, 69 bp, synthetic construct
  source 1..69: mol_type = other DNA
agagtgagtagtagtggagtctatgctaaggttaatctatcatttttttataggaaatggtggtagtgt

SEQ ID NO: 319 - DNA, 69 bp, synthetic construct
  source 1..69: mol_type = other DNA
agagtgagtagtagtggagtggaccaggtaattcttctataatgatattataggaaatggtggtagtgt

SEQ ID NO: 320 - DNA, 64 bp, synthetic construct
  source 1..64: mol_type = other DNA
agagtgagtagtagtggagtgttccgaagtgtaaacacttcccaataggaaatggtggtagtgt

SEQ ID NO: 321 - DNA, 66 bp, synthetic construct
  source 1..66: mol_type = other DNA
agagtgagtagtagtggagtgttcatcagtctagtgtaaacacgttataggaaatggtggtagtgt

SEQ ID NO: 322 - DNA, 68 bp, synthetic construct
  source 1..68: mol_type = other DNA
agagtgagtagtagtggagtctaggatactagtcattaactagtgccaataggaaatggtggtagtgt

SEQ ID NO: 323 - DNA, 67 bp, synthetic construct
  source 1..67: mol_type = other DNA
agagtgagtagtagtggagtcgttcatcagtctagtgtaaacacgttataggaaatggtggtagtgt

SEQ ID NO: 324 - DNA, 66 bp, synthetic construct
  source 1..66: mol_type = other DNA
tgtgatggaagttagagggtgtacttggacatgcacttccaatgcgtgtggagggattgaaggata

SEQ ID NO: 325 - DNA, 64 bp, synthetic construct
  source 1..64: mol_type = other DNA
tgtgatggaagttagagggtagtcttatgccatgcggcatattgtgtggagggattgaaggata

SEQ ID NO: 326 - DNA, 64 bp, synthetic construct
  source 1..64: mol_type = other DNA
tgtgatggaagttagagggtaggccactacacctaatggtgatctgtggagggattgaaggata

SEQ ID NO: 327 - DNA, 64 bp, synthetic construct
  source 1..64: mol_type = other DNA
tgtgatggaagttagagggtgatcctaatggtgtagtccactcgtgtggagggattgaaggata

SEQ ID NO: 328 - DNA, 64 bp, synthetic construct
  source 1..64: mol_type = other DNA
tgtgatggaagttagagggtgatgttccggtctcatcggctggatgtggagggattgaaggata

SEQ ID NO: 329 - DNA, 65 bp, synthetic construct
  source 1..65: mol_type = other DNA
tgtgatggaagttagagggtggacactcttatgccatgcggctattgtggagggattgaaggata

SEQ ID NO: 330 - DNA, 64 bp, synthetic construct
  source 1..64: mol_type = other DNA
tgtgatggaagttagagggttcattaatgcgtttgctgcaggtgtgtggagggattgaaggata

SEQ ID NO: 331 - DNA, 64 bp, synthetic construct
  source 1..64: mol_type = other DNA
tgtgatggaagttagagggtccctttcaccctctttagcggttatgtggagggattgaaggata

SEQ ID NO: 332 - DNA, 65 bp, synthetic construct
  source 1..65: mol_type = other DNA
tgtgatggaagttagagggtatgctacatacttattcgcccttaatgtggagggattgaaggata

SEQ ID NO: 333 - DNA, 64 bp, synthetic construct
  source 1..64: mol_type = other DNA
tgtgatggaagttagagggtgtgcatcactcattaacgagcaaatgtggagggattgaaggata

SEQ ID NO: 334 - DNA, 64 bp, synthetic construct
  source 1..64: mol_type = other DNA
tgtgatggaagttagagggtcaagggacgttcagttactaaacatgtggagggattgaaggata

SEQ ID NO: 335 - DNA, 64 bp, synthetic construct
  source 1..64: mol_type = other DNA
tgtgatggaagttagagggttccacgttcagttactaacgtggatgtggagggattgaaggata

SEQ ID NO: 336 - DNA, 64 bp, synthetic construct
  source 1..64: mol_type = other DNA
tgtgatggaagttagagggttagcctaggtgttgtcagcataagtgtggagggattgaaggata

SEQ ID NO: 337 - DNA, 68 bp, synthetic construct
  source 1..68: mol_type = other DNA
tgtgatggaagttagagggttagtcaactatactaacagactacctattgtggagggattgaaggata

SEQ ID NO: 338 - DNA, 65 bp, synthetic construct
  source 1..65: mol_type = other DNA
tgtgatggaagttagagggttccacgttcagttactaacgtcgaatgtggagggattgaaggata

SEQ ID NO: 339 - DNA, 64 bp, synthetic construct
  source 1..64: mol_type = other DNA
tgtgatggaagttagagggtggtcggcataaactgttatgcccatgtggagggattgaaggata

SEQ ID NO: 340 - DNA, 69 bp, synthetic construct
  source 1..69: mol_type = other DNA
tgtgatggaagttagagggtcgagtattcactgaaaagtaatatccatatgtggagggattgaaggata

SEQ ID NO: 341 - DNA, 64 bp, synthetic construct
  source 1..64: mol_type = other DNA
tgtgatggaagttagagggtgagctttccaattgagtgcaacgttgtggagggattgaaggata

SEQ ID NO: 342 - DNA, 68 bp, synthetic construct
  source 1..68: mol_type = other DNA
tgtgatggaagttagagggtcatgcatttaactctactcaagactgtatgtggagggattgaaggata

SEQ ID NO: 343 - DNA, 65 bp, synthetic construct
  source 1..65: mol_type = other DNA
tgtgatggaagttagagggtctttcgctactattatttcgctaggtgtggagggattgaaggata

SEQ ID NO: 344 - DNA, 64 bp, synthetic construct
  source 1..64: mol_type = other DNA
tgtgatggaagttagagggtccagggcagttgttttctcacatctgtggagggattgaaggata

SEQ ID NO: 345 - DNA, 64 bp, synthetic construct
  source 1..64: mol_type = other DNA
tgtgatggaagttagagggtgacgctgaccgaagtcagcacaggtgtggagggattgaaggata

SEQ ID NO: 346 - DNA, 65 bp, synthetic construct
  source 1..65: mol_type = other DNA
tgtgatggaagttagagggtgatactagccttccacttccaaggatgtggagggattgaaggata

SEQ ID NO: 347 - DNA, 64 bp, synthetic construct
  source 1..64: mol_type = other DNA
tgtgatggaagttagagggtacccttcaattctgagcttcgggctgtggagggattgaaggata

SEQ ID NO: 348 - DNA, 66 bp, synthetic construct
  source 1..66: mol_type = other DNA
tgtgatggaagttagagggtcagctccaactatcactagccttggttgtggagggattgaaggata

SEQ ID NO: 349 - DNA, 67 bp, synthetic construct
  source 1..67: mol_type = other DNA
tgtgatggaagttagagggtcctcagttaatgatagtgtgtcgattgataggaaatggtggtagtgt

SEQ ID NO: 350 - DNA, 64 bp, synthetic construct
  source 1..64: mol_type = other DNA
tgtgatggaagttagagggtggagccttggttttccggattacgataggaaatggtggtagtgt

SEQ ID NO: 351 - DNA, 66 bp, synthetic construct
  source 1..66: mol_type = other DNA
tgtgatggaagttagagggtgtgtctcatctctgaaaacttcccacataggaaatggtggtagtgt

SEQ ID NO: 352 - DNA, 64 bp, synthetic construct
  source 1..64: mol_type = other DNA
tgtgatggaagttagagggtgtcaccccattaagaggctccgtgataggaaatggtggtagtgt

SEQ ID NO: 353 - DNA, 64 bp, synthetic construct
  source 1..64: mol_type = other DNA
tgtgatggaagttagagggtccacgtcaatgagcaaaggtaaatataggaaatggtggtagtgt

SEQ ID NO: 354 - DNA, 64 bp, synthetic construct
  source 1..64: mol_type = other DNA
tgtgatggaagttagagggtgtaagctcacaatatgtgcataaaataggaaatggtggtagtgt

SEQ ID NO: 355 - DNA, 64 bp, synthetic construct
  source 1..64: mol_type = other DNA
tgtgatggaagttagagggtgatacacacactgattcaggcagaataggaaatggtggtagtgt

SEQ ID NO: 356 - DNA, 64 bp, synthetic construct
  source 1..64: mol_type = other DNA
tgtgatggaagttagagggtagtcttggttttccggatttgggaataggaaatggtggtagtgt

SEQ ID NO: 357 - DNA, 67 bp, synthetic construct
  source 1..67: mol_type = other DNA
tgtgatggaagttagagggtacctcagttaatgatagtgtgtcgtttataggaaatggtggtagtgt

SEQ ID NO: 358 - DNA, 64 bp, synthetic construct
  source 1..64: mol_type = other DNA
tgtgatggaagttagagggtgagccttggttttccggatttcggataggaaatggtggtagtgt

SEQ ID NO: 359 - DNA, 65 bp, synthetic construct
  source 1..65: mol_type = other DNA
tgtgatggaagttagagggtgtatcatctctgaaaacttccgaccataggaaatggtggtagtgt

SEQ ID NO: 360 - DNA, 64 bp, synthetic construct
  source 1..64: mol_type = other DNA
tgtgatggaagttagagggtgtgctcagccttggttttccgctaataggaaatggtggtagtgt

SEQ ID NO: 361 - DNA, 64 bp, synthetic construct
  source 1..64: mol_type = other DNA
tgtgatggaagttagagggttgcgtcaccccattaagaggcaggataggaaatggtggtagtgt

SEQ ID NO: 362 - DNA, 67 bp, synthetic construct
  source 1..67: mol_type = other DNA
tgtgatggaagttagagggtcatgtcaatgagcaaaggtattaagaaataggaaatggtggtagtgt

SEQ ID NO: 363 - DNA, 65 bp, synthetic construct
  source 1..65: mol_type = other DNA
tgtgatggaagttagagggtgtaagctcacaatatgtgcattaaaataggaaatggtggtagtgt

SEQ ID NO: 364 - DNA, 65 bp, synthetic construct
  source 1..65: mol_type = other DNA
tgtgatggaagttagagggtgaaactaacacacacactgattgtcataggaaatggtggtagtgt

SEQ ID NO: 365 - DNA, 66 bp, synthetic construct
  source 1..66: mol_type = other DNA
tgtgatggaagttagagggtctaagttaatgatagtgtgtcgattgataggaaatggtggtagtgt

SEQ ID NO: 366 - DNA, 67 bp, synthetic construct
  source 1..67: mol_type = other DNA
tgtgatggaagttagagggtgtgtctcatctctgaaaacttccgaccataggaaatggtggtagtgt

SEQ ID NO: 367 - DNA, 64 bp, synthetic construct
  source 1..64: mol_type = other DNA
tgtgatggaagttagagggtaggaaggcacattctcatctcactataggaaatggtggtagtgt

SEQ ID NO: 368 - DNA, 64 bp, synthetic construct
  source 1..64: mol_type = other DNA
tgtgatggaagttagagggtcgtcaccccattaagaggctcggtataggaaatggtggtagtgt

SEQ ID NO: 369 - DNA, 64 bp, synthetic construct
  source 1..64: mol_type = other DNA
tgtgatggaagttagagggtgcgtcaccccattaagaggctaggataggaaatggtggtagtgt

SEQ ID NO: 370 - DNA, 66 bp, synthetic construct
  source 1..66: mol_type = other DNA
tgtgatggaagttagagggtcatgtcaatgagcaaaggtattatgaataggaaatggtggtagtgt

SEQ ID NO: 371 - DNA, 64 bp, synthetic construct
  source 1..64: mol_type = other DNA
tgtgatggaagttagagggttaggctcacaatatgtgcattaaaataggaaatggtggtagtgt

SEQ ID NO: 372 - DNA, 64 bp, synthetic construct
  source 1..64: mol_type = other DNA
tgtgatggaagttagagggttgacacacacactgattcagggagataggaaatggtggtagtgt

SEQ ID NO: 373 - DNA, 66 bp, synthetic construct
  source 1..66: mol_type = other DNA
tgtgatggaagttagagggtcctcagttaatgatagtgtgtcgtttataggaaatggtggtagtgt

SEQ ID NO: 374 - DNA, 66 bp, synthetic construct
  source 1..66: mol_type = other DNA
tgtgatggaagttagagggtgttgtgaacaaactttcgactactccagagtgagtagtagtggagt

SEQ ID NO: 375 - DNA, 68 bp, synthetic construct
  source 1..68: mol_type = other DNA
tgtgatggaagttagagggtggacgcttaaaacgaataatggtggatgagagtgagtagtagtggagt

SEQ ID NO: 376 - DNA, 68 bp, synthetic construct
  source 1..68: mol_type = other DNA
tgtgatggaagttagagggtgtacttaaaacgaataatggtggtagtcagagtgagtagtagtggagt

SEQ ID NO: 377 - DNA, 64 bp, synthetic construct
  source 1..64: mol_type = other DNA
tgtgatggaagttagagggtggtgtccttacggacaatccagtcagagtgagtagtagtggagt

SEQ ID NO: 378 - DNA, 64 bp, synthetic construct
  source 1..64: mol_type = other DNA
tgtgatggaagttagagggtcagactcttgcggaacgtaagaggagagtgagtagtagtggagt

SEQ ID NO: 379 - DNA, 64 bp, synthetic construct
  source 1..64: mol_type = other DNA
tgtgatggaagttagagggtttgctcgaggaaacaatttccagaagagtgagtagtagtggagt

SEQ ID NO: 380 - DNA, 67 bp, synthetic construct
  source 1..67: mol_type = other DNA
tgtgatggaagttagagggtcgactccataaatggttactccacgccagagtgagtagtagtggagt

SEQ ID NO: 381 - DNA, 69 bp, synthetic construct
  source 1..69: mol_type = other DNA
tgtgatggaagttagagggttaacctaacactcaatctcactgcttcctagagtgagtagtagtggagt

SEQ ID NO: 382 - DNA, 64 bp, synthetic construct
  source 1..64: mol_type = other DNA
tgtgatggaagttagagggtttaggtaacccgataagggccggaagagtgagtagtagtggagt

SEQ ID NO: 383 - DNA, 65 bp, synthetic construct
  source 1..65: mol_type = other DNA
tgtgatggaagttagagggtctcagctccttatctgttcgctgctagagtgagtagtagtggagt

SEQ ID NO: 384 - DNA, 65 bp, synthetic construct
  source 1..65: mol_type = other DNA
tgtgatggaagttagagggtcacctccttgccattgtcaccaataagagtgagtagtagtggagt

SEQ ID NO: 385 - DNA, 64 bp, synthetic construct
  source 1..64: mol_type = other DNA
tgtgatggaagttagagggtgctcgaggaaacaatttcctcaggagagtgagtagtagtggagt

SEQ ID NO: 386 - DNA, 64 bp, synthetic construct
  source 1..64: mol_type = other DNA
tgtgatggaagttagagggtaattacacgtttgttcttcccattagagtgagtagtagtggagt

SEQ ID NO: 387 - DNA, 65 bp, synthetic construct
  source 1..65: mol_type = other DNA
tgtgatggaagttagagggtgtgaagagtgaacaaactttcgtgaagagtgagtagtagtggagt

SEQ ID NO: 388 - DNA, 69 bp, synthetic construct
  source 1..69: mol_type = other DNA
tgtgatggaagttagagggttactcgtctagtctgttcttttgtaagagagagtgagtagtagtggagt

SEQ ID NO: 389 - DNA, 64 bp, synthetic construct
  source 1..64: mol_type = other DNA
tgtgatggaagttagagggtaggcgctaacgtcaaaggagcttcagagtgagtagtagtggagt

SEQ ID NO: 390 - DNA, 68 bp, synthetic construct
  source 1..68: mol_type = other DNA
tgtgatggaagttagagggtgatagtgatagcaaaaccatctttctgaagagtgagtagtagtggagt

SEQ ID NO: 391 - DNA, 65 bp, synthetic construct
  source 1..65: mol_type = other DNA
tgtgatggaagttagagggttcggctccttatctgttcgctcctgagagtgagtagtagtggagt

SEQ ID NO: 392 - DNA, 64 bp, synthetic construct
  source 1..64: mol_type = other DNA
tgtgatggaagttagagggtctcagctccttatctgttcgcagcagagtgagtagtagtggagt

SEQ ID NO: 393 - DNA, 64 bp, synthetic construct
  source 1..64: mol_type = other DNA
tgtgatggaagttagagggtcacctccttgccattgtcaccttaagagtgagtagtagtggagt

SEQ ID NO: 394 - DNA, 64 bp, synthetic construct
  source 1..64: mol_type = other DNA
tgtgatggaagttagagggtggacactcaatctcactgcttcctagagtgagtagtagtggagt

SEQ ID NO: 395 - DNA, 65 bp, synthetic construct
  source 1..65: mol_type = other DNA
tgtgatggaagttagagggtgccaccacaattctagctagagcgaagagtgagtagtagtggagt

SEQ ID NO: 396 - DNA, 64 bp, synthetic construct
  source 1..64: mol_type = other DNA
tgtgatggaagttagagggtcggacactcaatctcactgctaccagagtgagtagtagtggagt

SEQ ID NO: 397 - DNA, 65 bp, synthetic construct
  source 1..65: mol_type = other DNA
tgtgatggaagttagagggtatcctcacgtatctcaggctccatgagagtgagtagtagtggagt

SEQ ID NO: 398 - DNA, 64 bp, synthetic construct
  source 1..64: mol_type = other DNA
tgtgatggaagttagagggtaagcagctgcacatatcgctaacgagagtgagtagtagtggagt

SEQ ID NO: 399 - DNA, 45 bp, synthetic construct
  source 1..45: mol_type = other DNA
agggtgtgtttgtaaagggtacttccccgtggttgagtcaaaaat

SEQ ID NO: 400 - DNA, 45 bp, synthetic construct
  source 1..45: mol_type = other DNA
tgtggagggattgaaggataacttccccgtggttgagtcaaaaat

SEQ ID NO: 401 - DNA, 48 bp, synthetic construct
  source 1..48: mol_type = other DNA
agggtgtgtttgtaaagggtaccccagacttggccttccaattgtagg

SEQ ID NO: 402 - DNA, 48 bp, synthetic construct
  source 1..48: mol_type = other DNA
tgtggagggattgaaggataaccccagacttggccttccaattgtagg

SEQ ID NO: 403 - DNA, 44 bp, synthetic construct
  source 1..44: mol_type = other DNA
agggtgtgtttgtaaagggtgagttccagaatgaggttgccagg

SEQ ID NO: 404 - DNA, 44 bp, synthetic construct
  source 1..44: mol_type = other DNA
tgtggagggattgaaggatagagttccagaatgaggttgccagg

SEQ ID NO: 405 - DNA, 45 bp, synthetic construct
  source 1..45: mol_type = other DNA
agggtgtgtttgtaaagggtagagttccagaatgaggttgccagg

SEQ ID NO: 406 - DNA, 45 bp, synthetic construct
  source 1..45: mol_type = other DNA
tgtggagggattgaaggataagagttccagaatgaggttgccagg

SEQ ID NO: 407 - DNA, 46 bp, synthetic construct
  source 1..46: mol_type = other DNA
agggtgtgtttgtaaagggtagggttcgccataaatggctaccgtc

SEQ ID NO: 408 - DNA, 46 bp, synthetic construct
  source 1..46: mol_type = other DNA
tgtggagggattgaaggataagggttcgccataaatggctaccgtc

SEQ ID NO: 409 - DNA, 44 bp, synthetic construct
  source 1..44: mol_type = other DNA
agggtgtgtttgtaaagggttgacatcgacttggagtcgattca

SEQ ID NO: 410 - DNA, 44 bp, synthetic construct
  source 1..44: mol_type = other DNA
tgtggagggattgaaggatatgacatcgacttggagtcgattca

SEQ ID NO: 411 - DNA, 48 bp, synthetic construct
  source 1..48: mol_type = other DNA
agggtgtgtttgtaaagggtcgttgactactggcaggatcaaccacta

SEQ ID NO: 412 - DNA, 48 bp, synthetic construct
  source 1..48: mol_type = other DNA
tgtggagggattgaaggatacgttgactactggcaggatcaaccacta

SEQ ID NO: 413 - DNA, 44 bp, synthetic construct
  source 1..44: mol_type = other DNA
agggtgtgtttgtaaagggtacttccccgtggttgagtcaataa

SEQ ID NO: 414 - DNA, 44 bp, synthetic construct
  source 1..44: mol_type = other DNA
tgtggagggattgaaggataacttccccgtggttgagtcaataa

SEQ ID NO: 415 - DNA, 45 bp, synthetic construct
  source 1..45: mol_type = other DNA
agggtgtgtttgtaaagggtggattcgccataaatggctaccgtc

SEQ ID NO: 416 - DNA, 45 bp, synthetic construct
  source 1..45: mol_type = other DNA
tgtggagggattgaaggataggattcgccataaatggctaccgtc

SEQ ID NO: 417 - DNA, 45 bp, synthetic construct
  source 1..45: mol_type = other DNA
agggtgtgtttgtaaagggtgtaacttggagtcgatagtcccaga

SEQ ID NO: 418 - DNA, 45 bp, synthetic construct
  source 1..45: mol_type = other DNA
tgtggagggattgaaggatagtaacttggagtcgatagtcccaga

SEQ ID NO: 419 - DNA, 49 bp, synthetic construct
  source 1..49: mol_type = other DNA
agggtgtgtttgtaaagggttcgatgactactggcaggatcaaccacta

SEQ ID NO: 420 - DNA, 49 bp, synthetic construct
  source 1..49: mol_type = other DNA
tgtggagggattgaaggatatcgatgactactggcaggatcaaccacta

SEQ ID NO: 421 - DNA, 46 bp, synthetic construct
  source 1..46: mol_type = other DNA
agggtgtgtttgtaaagggtagtacctcccctgaatcgggattccc

SEQ ID NO: 422 - DNA, 46 bp, synthetic construct
  source 1..46: mol_type = other DNA
tgtggagggattgaaggataagtacctcccctgaatcgggattccc

SEQ ID NO: 423 - DNA, 49 bp, synthetic construct
  source 1..49: mol_type = other DNA
agagtgagtagtagtggagtaacttgcttttcttcctctaatgaccttc

SEQ ID NO: 424 - DNA, 49 bp, synthetic construct
  source 1..49: mol_type = other DNA
ttggaggtgtagggagtaaaaacttgcttttcttcctctaatgaccttc

SEQ ID NO: 425 - DNA, 49 bp, synthetic construct
  source 1..49: mol_type = other DNA
agagtgagtagtagtggagtacgtgcttttcttcctctaatgaccatca

SEQ ID NO: 426 - DNA, 49 bp, synthetic construct
  source 1..49: mol_type = other DNA
ttggaggtgtagggagtaaaacgtgcttttcttcctctaatgaccatca

SEQ ID NO: 427 - DNA, 49 bp, synthetic construct
  source 1..49: mol_type = other DNA
agagtgagtagtagtggagtcgagcttttcttcctctaatgaccaacaa

SEQ ID NO: 428 - DNA, 49 bp, synthetic construct
  source 1..49: mol_type = other DNA
ttggaggtgtagggagtaaacgagcttttcttcctctaatgaccaacaa

SEQ ID NO: 429 - DNA, 44 bp, synthetic construct
  source 1..44: mol_type = other DNA
agagtgagtagtagtggagttgtcatggctaatctagcgggtta

SEQ ID NO: 430 - DNA, 44 bp, synthetic construct
  source 1..44: mol_type = other DNA
ttggaggtgtagggagtaaatgtcatggctaatctagcgggtta

SEQ ID NO: 431 - DNA, 44 bp, synthetic construct
  source 1..44: mol_type = other DNA
agagtgagtagtagtggagtctggcatggctaatctagcggcta

SEQ ID NO: 432 - DNA, 44 bp, synthetic construct
  source 1..44: mol_type = other DNA
ttggaggtgtagggagtaaactggcatggctaatctagcggcta

SEQ ID NO: 433 - DNA, 46 bp, synthetic construct
  source 1..46: mol_type = other DNA
agagtgagtagtagtggagtggattcgccaaaaggctagccagttc

SEQ ID NO: 434 - DNA, 46 bp, synthetic construct
  source 1..46: mol_type = other DNA
ttggaggtgtagggagtaaaggattcgccaaaaggctagccagttc

SEQ ID NO: 435 - DNA, 46 bp, synthetic construct
  source 1..46: mol_type = other DNA
agagtgagtagtagtggagtctggcatggctaatctagcgggaata

SEQ ID NO: 436 - DNA, 46 bp, synthetic construct
  source 1..46: mol_type = other DNA
ttggaggtgtagggagtaaactggcatggctaatctagcgggaata

SEQ ID NO: 437 - DNA, 46 bp, synthetic construct
  source 1..46: mol_type = other DNA
agagtgagtagtagtggagtacccgccaaaaggctagccagaacct

SEQ ID NO: 438 - DNA, 46 bp, synthetic construct
  source 1..46: mol_type = other DNA
ttggaggtgtagggagtaaaacccgccaaaaggctagccagaacct

SEQ ID NO: 439 - DNA, 47 bp, synthetic construct
  source 1..47: mol_type = other DNA
agagtgagtagtagtggagttcttgcatggctaatctagcgggagtt

SEQ ID NO: 440 - DNA, 47 bp, synthetic construct
  source 1..47: mol_type = other DNA
ttggaggtgtagggagtaaatcttgcatggctaatctagcgggagtt

SEQ ID NO: 441 - DNA, 45 bp, synthetic construct
  source 1..45: mol_type = other DNA
agagtgagtagtagtggagtctggcatggctaatctagcgggtta

SEQ ID NO: 442 - DNA, 45 bp, synthetic construct
  source 1..45: mol_type = other DNA
ttggaggtgtagggagtaaactggcatggctaatctagcgggtta

SEQ ID NO: 443 - DNA, 45 bp, synthetic construct
  source 1..45: mol_type = other DNA
agagtgagtagtagtggagttgtcatggctaatctagcgggaata

SEQ ID NO: 444 - DNA, 45 bp, synthetic construct
  source 1..45: mol_type = other DNA
ttggaggtgtagggagtaaatgtcatggctaatctagcgggaata

SEQ ID NO: 445 - DNA, 44 bp, synthetic construct
  source 1..44: mol_type = other DNA
agagtgagtagtagtggagtagggttcgccaaaaggctagcgtc

SEQ ID NO: 446 - DNA, 44 bp, synthetic construct
  source 1..44: mol_type = other DNA
ttggaggtgtagggagtaaaagggttcgccaaaaggctagcgtc

SEQ ID NO: 447 - DNA, 49 bp, synthetic construct
  source 1..49: mol_type = other DNA
tgtggagggattgaaggatatattctcttccaagaggtcgagatttatt

SEQ ID NO: 448 - DNA, 49 bp, synthetic construct
  source 1..49: mol_type = other DNA
ttggaggtgtagggagtaaatattctcttccaagaggtcgagatttatt

SEQ ID NO: 449 - DNA, 44 bp, synthetic construct
  source 1..44: mol_type = other DNA
tgtggagggattgaaggatagagattaccgcgggctgctgggtg

SEQ ID NO: 450 - DNA, 44 bp, synthetic construct
  source 1..44: mol_type = other DNA
ttggaggtgtagggagtaaagagattaccgcgggctgctgggtg

SEQ ID NO: 451 - DNA, 47 bp, synthetic construct
  source 1..47: mol_type = other DNA
tgtggagggattgaaggatagtctctccgctctgaagtggagtccgg

SEQ ID NO: 452 - DNA, 47 bp, synthetic construct
  source 1..47: mol_type = other DNA
ttggaggtgtagggagtaaagtctctccgctctgaagtggagtccgg

SEQ ID NO: 453 - DNA, 48 bp, synthetic construct
  source 1..48: mol_type = other DNA
tgtggagggattgaaggataaaagtacacgaaaaaatcggaccggagt

SEQ ID NO: 454 - DNA, 48 bp, synthetic construct
  source 1..48: mol_type = other DNA
ttggaggtgtagggagtaaaaaagtacacgaaaaaatcggaccggagt

SEQ ID NO: 455 - DNA, 49 bp, synthetic construct
  source 1..49: mol_type = other DNA
tgtggagggattgaaggatagtacagtacacgaaaaaatcggaccgcgg

SEQ ID NO: 456 - DNA, 49 bp, synthetic construct
  source 1..49: mol_type = other DNA
ttggaggtgtagggagtaaagtacagtacacgaaaaaatcggaccgcgg

SEQ ID NO: 457 - DNA, 44 bp, synthetic construct
  source 1..44: mol_type = other DNA
tgtggagggattgaaggatagtgcctccctgtgtcaggattccc

SEQ ID NO: 458 - DNA, 44 bp, synthetic construct
  source 1..44: mol_type = other DNA
ttggaggtgtagggagtaaagtgcctccctgtgtcaggattccc

SEQ ID NO: 459 - DNA, 45 bp, synthetic construct
  source 1..45: mol_type = other DNA
tgtggagggattgaaggatagtgcctccctgtgtcaggattgcca

SEQ ID NO: 460 - DNA, 45 bp, synthetic construct
  source 1..45: mol_type = other DNA
ttggaggtgtagggagtaaagtgcctccctgtgtcaggattgcca

SEQ ID NO: 461 - DNA, 45 bp, synthetic construct
  source 1..45: mol_type = other DNA
tgtggagggattgaaggatacatgtgccgagtgggtcactaattt

SEQ ID NO: 462 - DNA, 45 bp, synthetic construct
  source 1..45: mol_type = other DNA
ttggaggtgtagggagtaaacatgtgccgagtgggtcactaattt

SEQ ID NO: 463 - DNA, 49 bp, synthetic construct
  source 1..49: mol_type = other DNA
tgtggagggattgaaggatactcggtcactaaaaaaacaccacccgtag

SEQ ID NO: 464 - DNA, 49 bp, synthetic construct
  source 1..49: mol_type = other DNA
ttggaggtgtagggagtaaactcggtcactaaaaaaacaccacccgtag

SEQ ID NO: 465 - DNA, 45 bp, synthetic construct
  source 1..45: mol_type = other DNA
tgtggagggattgaaggataagagccaaggttagactcgctgcga

SEQ ID NO: 466 - DNA, 45 bp, synthetic construct
  source 1..45: mol_type = other DNA
ttggaggtgtagggagtaaaagagccaaggttagactcgctgcga

SEQ ID NO: 467 - DNA, 49 bp, synthetic construct
  source 1..49: mol_type = other DNA
tgtggagggattgaaggatactggcatggcttaatttttagacaaaatg

SEQ ID NO: 468 - DNA, 49 bp, synthetic construct
  source 1..49: mol_type = other DNA
ttggaggtgtagggagtaaactggcatggcttaatttttagacaaaatg

SEQ ID NO: 469 - DNA, 49 bp, synthetic construct
  source 1..49: mol_type = other DNA
tgtggagggattgaaggatattaatctcttccaagaggtcgagattaat

SEQ ID NO: 470 - DNA, 49 bp, synthetic construct
  source 1..49: mol_type = other DNA
ttggaggtgtagggagtaaattaatctcttccaagaggtcgagattaat

SEQ ID NO: 471 - DNA, 47 bp, synthetic construct
  source 1..47: mol_type = other DNA
agggtgtgtttgtaaagggtcctcagttaatgatagtgtgtcgattg

SEQ ID NO: 472 - DNA, 44 bp, synthetic construct
  source 1..44: mol_type = other DNA
ataggaaatggtggtagtgtggagccttggttttccggattacg

SEQ ID NO: 473 - DNA, 46 bp, synthetic construct
  source 1..46: mol_type = other DNA
agggtgtgtttgtaaagggtgtgtctcatctctgaaaacttcccac

SEQ ID NO: 474 - DNA, 44 bp, synthetic construct
  source 1..44: mol_type = other DNA
ataggaaatggtggtagtgtgtcaccccattaagaggctccgtg

SEQ ID NO: 475 - DNA, 44 bp, synthetic construct
  source 1..44: mol_type = other DNA
agggtgtgtttgtaaagggtccacgtcaatgagcaaaggtaaat

SEQ ID NO: 476 - DNA, 44 bp, synthetic construct
  source 1..44: mol_type = other DNA
ataggaaatggtggtagtgtgtaagctcacaatatgtgcataaa

SEQ ID NO: 477 - DNA, 44 bp, synthetic construct
  source 1..44: mol_type = other DNA
agggtgtgtttgtaaagggtgatacacacactgattcaggcaga

SEQ ID NO: 478 - DNA, 44 bp, synthetic construct
  source 1..44: mol_type = other DNA
ataggaaatggtggtagtgtagtcttggttttccggatttggga

SEQ ID NO: 479 - DNA, 47 bp, synthetic construct
  source 1..47: mol_type = other DNA
agggtgtgtttgtaaagggtacctcagttaatgatagtgtgtcgttt

SEQ ID NO: 480 - DNA, 44 bp, synthetic construct
  source 1..44: mol_type = other DNA
ataggaaatggtggtagtgtgagccttggttttccggatttcgg

SEQ ID NO: 481 - DNA, 45 bp, synthetic construct
  source 1..45: mol_type = other DNA
agggtgtgtttgtaaagggtgtatcatctctgaaaacttccgacc

SEQ ID NO: 482 - DNA, 44 bp, synthetic construct
  source 1..44: mol_type = other DNA
ataggaaatggtggtagtgtgtgctcagccttggttttccgcta

SEQ ID NO: 483 - DNA, 44 bp, synthetic construct
  source 1..44: mol_type = other DNA
agggtgtgtttgtaaagggttgcgtcaccccattaagaggcagg

SEQ ID NO: 484 - DNA, 47 bp, synthetic construct
  source 1..47: mol_type = other DNA
ataggaaatggtggtagtgtcatgtcaatgagcaaaggtattaagaa

SEQ ID NO: 485 - DNA, 45 bp, synthetic construct
  source 1..45: mol_type = other DNA
agggtgtgtttgtaaagggtgtaagctcacaatatgtgcattaaa

SEQ ID NO: 486 - DNA, 45 bp, synthetic construct
  source 1..45: mol_type = other DNA
ataggaaatggtggtagtgtgaaactaacacacacactgattgtc

SEQ ID NO: 487 - DNA, 46 bp, synthetic construct
  source 1..46: mol_type = other DNA
agggtgtgtttgtaaagggtctaagttaatgatagtgtgtcgattg

SEQ ID NO: 488 - DNA, 47 bp, synthetic construct
  source 1..47: mol_type = other DNA
ataggaaatggtggtagtgtgtgtctcatctctgaaaacttccgacc

SEQ ID NO: 489 - DNA, 44 bp, synthetic construct
  source 1..44: mol_type = other DNA
agggtgtgtttgtaaagggtaggaaggcacattctcatctcact

SEQ ID NO: 490 - DNA, 44 bp, synthetic construct
  source 1..44: mol_type = other DNA
ataggaaatggtggtagtgtcgtcaccccattaagaggctcggt

SEQ ID NO: 491 - DNA, 44 bp, synthetic construct
  source 1..44: mol_type = other DNA
agggtgtgtttgtaaagggtgcgtcaccccattaagaggctagg

SEQ ID NO: 492 - DNA, 46 bp, synthetic construct
  source 1..46: mol_type = other DNA
ataggaaatggtggtagtgtcatgtcaatgagcaaaggtattatga

SEQ ID NO: 493 - DNA, 44 bp, synthetic construct
  source 1..44: mol_type = other DNA
agggtgtgtttgtaaagggttaggctcacaatatgtgcattaaa

SEQ ID NO: 494 - DNA, 44 bp, synthetic construct
  source 1..44: mol_type = other DNA
ataggaaatggtggtagtgttgacacacacactgattcagggag

SEQ ID NO: 495 - DNA, 46 bp, synthetic construct
  source 1..46: mol_type = other DNA
agggtgtgtttgtaaagggtcctcagttaatgatagtgtgtcgttt

SEQ ID NO: 496 - DNA, 47 bp, synthetic construct
  source 1..47: mol_type = other DNA
cgtcggagtgggttcagtctatcatcgccagcgccttacaaagctct

SEQ ID NO: 497 - DNA, 46 bp, synthetic construct
  source 1..46: mol_type = other DNA
gatgatgtagtagtaagggtcggttcgagctgcgttgcggcttcca

SEQ ID NO: 498 - DNA, 46 bp, synthetic construct
  source 1..46: mol_type = other DNA
gatgatgtagtagtaagggtaagaccacgcgccagtgcaggtttca

SEQ ID NO: 499 - DNA, 46 bp, synthetic construct
  source 1..46: mol_type = other DNA
gatgatgtagtagtaagggtgcacgctgctgcaacaattgccgggt

SEQ ID NO: 500 - DNA, 46 bp, synthetic construct
  source 1..46: mol_type = other DNA
gatgatgtagtagtaagggtgtctacgcggcggcctttcaaccctt

SEQ ID NO: 501 - DNA, 46 bp, synthetic construct
  source 1..46: mol_type = other DNA
gatgatgtagtagtaagggtttaacgctgcgccagaccttcaacga

SEQ ID NO: 502 - DNA, 46 bp, synthetic construct
  source 1..46: mol_type = other DNA
gatgatgtagtagtaagggtcagaagcgtcgtggcacctacgcagt

SEQ ID NO: 503 - DNA, 46 bp, synthetic construct
  source 1..46: mol_type = other DNA
gatgatgtagtagtaagggtcagacccacacggcgagcctgttcaa

SEQ ID NO: 504 - DNA, 46 bp, synthetic construct
  source 1..46: mol_type = other DNA
gatgatgtagtagtaagggtcgcacgacgcaccgcttcggtcagat

SEQ ID NO: 505 - DNA, 46 bp, synthetic construct
  source 1..46: mol_type = other DNA
gatgatgtagtagtaagggtaaaatccggcagctgacggtcagcaa

SEQ ID NO: 506 - DNA, 46 bp, synthetic construct
  source 1..46: mol_type = other DNA
gatgatgtagtagtaagggtaaatcgcgctcgctttccatcatgcg

SEQ ID NO: 507 - DNA, 46 bp, synthetic construct
  source 1..46: mol_type = other DNA
gatgatgtagtagtaagggtgaatacccgcgccgaccatggtatgt

SEQ ID NO: 508 - DNA, 46 bp, synthetic construct
  source 1..46: mol_type = other DNA
gatgatgtagtagtaagggtctatgggcatcggcaagagcaagctg

SEQ ID NO: 509 - DNA, 46 bp, synthetic construct
  source 1..46: mol_type = other DNA
gatgatgtagtagtaagggtacgtttcaggatgtcggccagcgtgc

SEQ ID NO: 510 - DNA, 46 bp, synthetic construct
  source 1..46: mol_type = other DNA
gatgatgtagtagtaagggtagcatacggaccatcgcctcgtcgct

SEQ ID NO: 511 - DNA, 46 bp, synthetic construct
  source 1..46: mol_type = other DNA
gatgatgtagtagtaagggtgcatgcagcacctgaatggtacggcg

SEQ ID NO: 512 - DNA, 46 bp, synthetic construct
  source 1..46: mol_type = other DNA
gatgatgtagtagtaagggtttattgcacatggtggtgcagctcgt

SEQ ID NO: 513 - DNA, 46 bp, synthetic construct
  source 1..46: mol_type = other DNA
gatgatgtagtagtaagggtcttttggttgtcgtgcccgagtgcaa

SEQ ID NO: 514 - DNA, 46 bp, synthetic construct
  source 1..46: mol_type = other DNA
gatgatgtagtagtaagggtaacagtaatgttggcggtggtcgccc

SEQ ID NO: 515 - DNA, 46 bp, synthetic construct
  source 1..46: mol_type = other DNA
gatgatgtagtagtaagggtggtatcgggcgatttggatccgccag

SEQ ID NO: 516 - DNA, 46 bp, synthetic construct
  source 1..46: mol_type = other DNA
gatgatgtagtagtaagggttcattgccttgttcggctcgttcggt

SEQ ID NO: 517 - DNA, 46 bp, synthetic construct
  source 1..46: mol_type = other DNA
gatgatgtagtagtaagggtttggcgcaccagatcctgtgatggct

SEQ ID NO: 518 - DNA, 46 bp, synthetic construct
  source 1..46: mol_type = other DNA
gatgatgtagtagtaagggttacgcttaccacaccgagcaccagct

SEQ ID NO: 519 - DNA, 46 bp, synthetic construct
  source 1..46: mol_type = other DNA
gatgatgtagtagtaagggtctacgttcacgctttcacctccacgc

SEQ ID NO: 520 - DNA, 46 bp, synthetic construct
  source 1..46: mol_type = other DNA
gatgatgtagtagtaagggtgtgccgttgggccgaggaacaggaat

SEQ ID NO: 521 - DNA, 46 bp, synthetic construct
  source 1..46: mol_type = other DNA
gatgatgtagtagtaagggtccggcaccaaccagacgagacaccga

SEQ ID NO: 522 - DNA, 46 bp, synthetic construct
  source 1..46: mol_type = other DNA
gatgatgtagtagtaagggtgacgacggcgacgatccggtcttcat

SEQ ID NO: 523 - DNA, 46 bp, synthetic construct
  source 1..46: mol_type = other DNA
gatgatgtagtagtaagggtattcgcgatggtgcagttcttgctcc

SEQ ID NO: 524 - DNA, 46 bp, synthetic construct
  source 1..46: mol_type = other DNA
gatgatgtagtagtaagggtgacgaaacgacgttccagcgcagcat

SEQ ID NO: 525 - DNA, 42 bp, synthetic construct
  source 1..42: mol_type = other DNA
tggaagttagagggtcctcagttaatgatagtgtgtcgattg

SEQ ID NO: 526 - DNA, 39 bp, synthetic construct
  source 1..39: mol_type = other DNA
tggaagttagagggtggagccttggttttccggattacg

SEQ ID NO: 527 - DNA, 41 bp, synthetic construct
  source 1..41: mol_type = other DNA
tggaagttagagggtgtgtctcatctctgaaaacttcccac

SEQ ID NO: 528 - DNA, 39 bp, synthetic construct
  source 1..39: mol_type = other DNA
tggaagttagagggtgtcaccccattaagaggctccgtg

SEQ ID NO: 529 - DNA, 39 bp, synthetic construct
  source 1..39: mol_type = other DNA
tggaagttagagggtccacgtcaatgagcaaaggtaaat

SEQ ID NO: 530 - DNA, 39 bp, synthetic construct
  source 1..39: mol_type = other DNA
tggaagttagagggtgtaagctcacaatatgtgcataaa

SEQ ID NO: 531 - DNA, 39 bp, synthetic construct
  source 1..39: mol_type = other DNA
tggaagttagagggtgatacacacactgattcaggcaga

SEQ ID NO: 532 - DNA, 39 bp, synthetic construct
  source 1..39: mol_type = other DNA
tggaagttagagggtagtcttggttttccggatttggga

SEQ ID NO: 533 - DNA, 42 bp, synthetic construct
  source 1..42: mol_type = other DNA
tggaagttagagggtacctcagttaatgatagtgtgtcgttt

SEQ ID NO: 534 - DNA, 39 bp, synthetic construct
  source 1..39: mol_type = other DNA
tggaagttagagggtgagccttggttttccggatttcgg

SEQ ID NO: 535 - DNA, 40 bp, synthetic construct
  source 1..40: mol_type = other DNA
tggaagttagagggtgtatcatctctgaaaacttccgacc

SEQ ID NO: 536 - DNA, 39 bp, synthetic construct
  source 1..39: mol_type = other DNA
tggaagttagagggtgtgctcagccttggttttccgcta

SEQ ID NO: 537 - DNA, 39 bp, synthetic construct
  source 1..39: mol_type = other DNA
tggaagttagagggttgcgtcaccccattaagaggcagg

SEQ ID NO: 538 - DNA, 42 bp, synthetic construct
  source 1..42: mol_type = other DNA
tggaagttagagggtcatgtcaatgagcaaaggtattaagaa

SEQ ID NO: 539 - DNA, 40 bp, synthetic construct
  source 1..40: mol_type = other DNA
tggaagttagagggtgtaagctcacaatatgtgcattaaa

SEQ ID NO: 540 - DNA, 40 bp, synthetic construct
  source 1..40: mol_type = other DNA
tggaagttagagggtgaaactaacacacacactgattgtc

SEQ ID NO: 541 - DNA, 41 bp, synthetic construct
  source 1..41: mol_type = other DNA
tggaagttagagggtctaagttaatgatagtgtgtcgattg

SEQ ID NO: 542 - DNA, 42 bp, synthetic construct
  source 1..42: mol_type = other DNA
tggaagttagagggtgtgtctcatctctgaaaacttccgacc

SEQ ID NO: 543 - DNA, 39 bp, synthetic construct
  source 1..39: mol_type = other DNA
tggaagttagagggtaggaaggcacattctcatctcact

SEQ ID NO: 544 - DNA, 39 bp, synthetic construct
  source 1..39: mol_type = other DNA
tggaagttagagggtcgtcaccccattaagaggctcggt

SEQ ID NO: 545 - DNA, 39 bp, synthetic construct
  source 1..39: mol_type = other DNA
tggaagttagagggtgcgtcaccccattaagaggctagg

SEQ ID NO: 546 - DNA, 41 bp, synthetic construct
  source 1..41: mol_type = other DNA
tggaagttagagggtcatgtcaatgagcaaaggtattatga

SEQ ID NO: 547 - DNA, 39 bp, synthetic construct
  source 1..39: mol_type = other DNA
tggaagttagagggttaggctcacaatatgtgcattaaa

SEQ ID NO: 548 - DNA, 39 bp, synthetic construct
  source 1..39: mol_type = other DNA
tggaagttagagggttgacacacacactgattcagggag

SEQ ID NO: 549 - DNA, 40 bp, synthetic construct
  source 1..40: mol_type = other DNA
aggttgagaataggagaggctcagtagttttggatgctca

SEQ ID NO: 550 - DNA, 40 bp, synthetic construct
  source 1..40: mol_type = other DNA
aggttgagaataggaagacgcgtcacttacgtgacacggc

SEQ ID NO: 551 - DNA, 39 bp, synthetic construct
  source 1..39: mol_type = other DNA
aggttgagaataggagtggaggtgctggtaactaagctg

SEQ ID NO: 552 - DNA, 41 bp, synthetic construct
  source 1..41: mol_type = other DNA
aggttgagaataggactagttttatgggattagctccagga

SEQ ID NO: 553 - DNA, 39 bp, synthetic construct
  source 1..39: mol_type = other DNA
aggttgagaataggagaggaaagttctcagcatgtcttc

SEQ ID NO: 554 - DNA, 39 bp, synthetic construct
  source 1..39: mol_type = other DNA
aggttgagaataggaacacccatgctcggcacttctccc

SEQ ID NO: 555 - DNA, 39 bp, synthetic construct
  source 1..39: mol_type = other DNA
aggttgagaataggacgcggtgtttttcacacccataca

SEQ ID NO: 556 - DNA, 39 bp, synthetic construct
  source 1..39: mol_type = other DNA
aggttgagaataggatggccagagtgatacatgagggcg

SEQ ID NO: 557 - DNA, 39 bp, synthetic construct
  source 1..39: mol_type = other DNA
aggttgagaataggatggctatctccgagcttgatttcg

SEQ ID NO: 558 - DNA, 39 bp, synthetic construct
  source 1..39: mol_type = other DNA
aggttgagaataggaggcacacaggaaattccaccaagg

SEQ ID NO: 559 - DNA, 39 bp, synthetic construct
  source 1..39: mol_type = other DNA
aggttgagaataggaaagatccaacttgctgaaccagga

SEQ ID NO: 560 - DNA, 39 bp, synthetic construct
  source 1..39: mol_type = other DNA
aggttgagaataggatgcgtcacctaacaagtaggcagg

SEQ ID NO: 561 - DNA, 41 bp, synthetic construct
  source 1..41: mol_type = other DNA
aggttgagaataggacgtgtattaacttactgcccttcgag

SEQ ID NO: 562 - DNA, 39 bp, synthetic construct
  source 1..39: mol_type = other DNA
aggttgagaataggaacaagacaaagtttctcgtgcagg

SEQ ID NO: 563 - DNA, 39 bp, synthetic construct
  source 1..39: mol_type = other DNA
aggttgagaataggaaaacttcaaagatcctttcgccat

SEQ ID NO: 564 - DNA, 40 bp, synthetic construct
  source 1..40: mol_type = other DNA
aggttgagaataggagcacgctaaaatcaatgaagctatt

SEQ ID NO: 565 - DNA, 39 bp, synthetic construct
  source 1..39: mol_type = other DNA
aggttgagaataggacgatctgatagcgtgaggtccctt

SEQ ID NO: 566 - DNA, 42 bp, synthetic construct
  source 1..42: mol_type = other DNA
aggttgagaataggaataattcagtacaagatacctaggaat

SEQ ID NO: 567 - DNA, 39 bp, synthetic construct
  source 1..39: mol_type = other DNA
aggttgagaataggaaggcgctgaatccaggagcaacga

SEQ ID NO: 568 - DNA, 39 bp, synthetic construct
  source 1..39: mol_type = other DNA
aggttgagaataggacaaaacgctctatgatcgtcaata

SEQ ID NO: 569 - DNA, 41 bp, synthetic construct
  source 1..41: mol_type = other DNA
aggttgagaataggagcagtgtttttcacacccattgtgca

SEQ ID NO: 570 - DNA, 39 bp, synthetic construct
  source 1..39: mol_type = other DNA
aggttgagaataggactgcgatcggttttatgggatatc

SEQ ID NO: 571 - DNA, 39 bp, synthetic construct
  source 1..39: mol_type = other DNA
aggttgagaataggaggatcgacgtgtctgtctcgctca

SEQ ID NO: 572 - DNA, 39 bp, synthetic construct
  source 1..39: mol_type = other DNA
aggttgagaataggaggtgcagtaaccagaagtacacct

SEQ ID NO: 573 - DNA, 39 bp, synthetic construct
  source 1..39: mol_type = other DNA
ggtgtagggagtaaaacctcttcgactggtctcagcagg

SEQ ID NO: 574 - DNA, 42 bp, synthetic construct
  source 1..42: mol_type = other DNA
ggtgtagggagtaaatgcaatcgatgaggttattaacctgta

SEQ ID NO: 575 - DNA, 41 bp, synthetic construct
  source 1..41: mol_type = other DNA
ggtgtagggagtaaacatcagtcacacccgaaggtgctagg

SEQ ID NO: 576 - DNA, 41 bp, synthetic construct
  source 1..41: mol_type = other DNA
ggtgtagggagtaaagcaatcgatgaggttattaacctgta

SEQ ID NO: 577 - DNA, 40 bp, synthetic construct
  source 1..40: mol_type = other DNA
ggtgtagggagtaaacatcagtcacacccgaaggtgcagg

SEQ ID NO: 578 - DNA, 40 bp, synthetic construct
  source 1..40: mol_type = other DNA
ggtgtagggagtaaaatgagtcacacccgaaggtgctagg

SEQ ID NO: 579 - DNA, 40 bp, synthetic construct
  source 1..40: mol_type = other DNA
ggtgtagggagtaaatcccttcacctacacaccagcgacg

SEQ ID NO: 580 - DNA, 39 bp, synthetic construct
  source 1..39: mol_type = other DNA
ggtgtagggagtaaatcccttcacctacacaccagccac

SEQ ID NO: 581 - DNA, 39 bp, synthetic construct
  source 1..39: mol_type = other DNA
ggtgtagggagtaaatgaccgcaaccccggtgagggcgg

SEQ ID NO: 582 - DNA, 39 bp, synthetic construct
  source 1..39: mol_type = other DNA
ggtgtagggagtaaaagagactggtctcagctccacggc

SEQ ID NO: 583 - DNA, 39 bp, synthetic construct
  source 1..39: mol_type = other DNA
ggtgtagggagtaaaatgagtcacacccgaaggtgcagg

SEQ ID NO: 584 - DNA, 39 bp, synthetic construct
  source 1..39: mol_type = other DNA
ggtgtagggagtaaatgcgtcacacccgaaggtgctagg

SEQ ID NO: 585 - DNA, 39 bp, synthetic construct
  source 1..39: mol_type = other DNA
ggtgtagggagtaaagtgctcagccttgattatccgcta

SEQ ID NO: 586 - DNA, 39 bp, synthetic construct
  source 1..39: mol_type = other DNA
ggtgtagggagtaaaccacgtcaatcgatgaggttaaat

SEQ ID NO: 587 - DNA, 39 bp, synthetic construct
  source 1..39: mol_type = other DNA
ggtgtagggagtaaaaataacctcatcgccttcctcagg

SEQ ID NO: 588 - DNA, 39 bp, synthetic construct
  source 1..39: mol_type = other DNA
ggtgtagggagtaaacccacgtcaatcgatgaggtttaa

SEQ ID NO: 589 - DNA, 39 bp, synthetic construct
  source 1..39: mol_type = other DNA
ggtgtagggagtaaacatcagtcacacccgaaggtggag

SEQ ID NO: 590 - DNA, 39 bp, synthetic construct
  source 1..39: mol_type = other DNA
ggtgtagggagtaaacccttcacctacacaccagcgacg

SEQ ID NO: 591 - DNA, 20 bp, synthetic construct
  source 1..20: mol_type = other DNA
tgtgatggaagttagagggt

SEQ ID NO: 592 - DNA, 20 bp, synthetic construct
  source 1..20: mol_type = other DNA
ttggaggtgtagggagtaaa

SEQ ID NO: 593 - DNA, 20 bp, synthetic construct
  source 1..20: mol_type = other DNA
aggttaggttgagaatagga

SEQ ID NO: 594 - DNA, 20 bp, synthetic construct
  source 1..20: mol_type = other DNA
  misc_feature 1: note = 5' Alexa Fluor dye 488 (NHS Ester)
accctctaacttccatcaca

SEQ ID NO: 595 - DNA, 20 bp, synthetic construct
  source 1..20: mol_type = other DNA
  misc_feature 1: note = 5' Alexa Fluor dye 488 (NHS Ester)
tttactccctacacctccaa

SEQ ID NO: 596 - DNA, 20 bp, synthetic construct
  source 1..20: mol_type = other DNA
  misc_feature 1: note = 5' Alexa Fluor dye 488 (NHS Ester)
tcctattctcaacctaacct

SEQ ID NO: 597 - DNA, 25 bp, synthetic construct
  source 1..25: mol_type = other DNA
  misc_feature 1: note = 5' Alexa Fluor dye 532 (NHS Ester)
cccaactacccatattaacacaccc

SEQ ID NO: 598 - DNA, 25 bp, synthetic construct
  source 1..25: mol_type = other DNA
  misc_feature 1: note = 5' ROX (carboxy-X-rhodamine) (NHS Ester)
cccttctcactaaattccaacaccc

SEQ ID NO: 599 - DNA, 25 bp, synthetic construct
  source 1..25: mol_type = other DNA
  misc_feature 1: note = 5' Alexa Fluor dye 647(NHS Ester)
caccctcatatctattaccctccca

SEQ ID NO: 600 - DNA, 25 bp, synthetic construct
  source 1..25: mol_type = other DNA
  misc_feature 1: note = 5' Alexa Fluor dye 488 (NHS Ester)
tccctccttactattacactcaccc

SEQ ID NO: 601 - DNA, 25 bp, synthetic construct
  source 1..25: mol_type = other DNA
  misc_feature 1: note = 5' Alexa Fluor dye 532 (NHS Ester)
catccctccttattatcctcatccc

SEQ ID NO: 602 - DNA, 25 bp, synthetic construct
  source 1..25: mol_type = other DNA
  misc_feature 1: note = 5' Alexa Fluor dye 546 (NHS Ester)
cccttctactacttccatacatccc

SEQ ID NO: 603 - DNA, 25 bp, synthetic construct
  source 1..25: mol_type = other DNA
  misc_feature 1: note = 5' ROX (carboxy-X-rhodamine) (NHS Ester)
cccttctaatcctatacactcaccc

SEQ ID NO: 604 - DNA, 25 bp, synthetic construct
  source 1..25: mol_type = other DNA
  misc_feature 1: note = 5' Alexa Fluor dye 488 (NHS Ester)
cccatctctctaattctactccacc

SEQ ID NO: 605 - DNA, 25 bp, synthetic construct
  source 1..25: mol_type = other DNA
  misc_feature 1: note = 5' Alexa Fluor dye 532 (NHS Ester)
tccctcctcttaatacatcctcctc

SEQ ID NO: 606 - DNA, 25 bp, synthetic construct
  source 1..25: mol_type = other DNA
  misc_feature 1: note = 5' ROX (carboxy-X-rhodamine) (NHS Ester)
catccctacttacttatcctccacc

SEQ ID NO: 607 - DNA, 25 bp, synthetic construct
  source 1..25: mol_type = other DNA
  misc_feature 1: note = 5' Alexa Fluor dye 647 (NHS Ester)
cccttctccataactatacccttcc

SEQ ID NO: 608 - DNA, 25 bp, synthetic construct
  source 1..25: mol_type = other DNA
gggtgtgttaatatgggtagttggg

SEQ ID NO: 609 - DNA, 25 bp, synthetic construct
  source 1..25: mol_type = other DNA
gggtgttggaatttagtgagaaggg

SEQ ID NO: 610 - DNA, 25 bp, synthetic construct
  source 1..25: mol_type = other DNA
tgggagggtaatagatatgagggtg

SEQ ID NO: 611 - DNA, 25 bp, synthetic construct
  source 1..25: mol_type = other DNA
gggtgagtgtaatagtaaggaggga

SEQ ID NO: 612 - DNA, 25 bp, synthetic construct
  source 1..25: mol_type = other DNA
gggatgaggataataaggagggatg

SEQ ID NO: 613 - DNA, 25 bp, synthetic construct
  source 1..25: mol_type = other DNA
gggatgtatggaagtagtagaaggg

SEQ ID NO: 614 - DNA, 25 bp, synthetic construct
  source 1..25: mol_type = other DNA
gggtgagtgtataggattagaaggg

SEQ ID NO: 615 - DNA, 25 bp, synthetic construct
  source 1..25: mol_type = other DNA
ggtggagtagaattagagagatggg

SEQ ID NO: 616 - DNA, 25 bp, synthetic construct
  source 1..25: mol_type = other DNA
gaggaggatgtattaagaggaggga

SEQ ID NO: 617 - DNA, 25 bp, synthetic construct
  source 1..25: mol_type = other DNA
ggtggaggataagtaagtagggatg

SEQ ID NO: 618 - DNA, 25 bp, synthetic construct
  source 1..25: mol_type = other DNA
ggaagggtatagttatggagaaggg

SEQ ID NO: 619 - DNA, 27 bp, synthetic construct
  source 1..27: mol_type = other DNA
cctcagttaatgatagtgtgtcgattg

SEQ ID NO: 620 - DNA, 24 bp, synthetic construct
  source 1..24: mol_type = other DNA
ggagccttggttttccggattacg

SEQ ID NO: 621 - DNA, 26 bp, synthetic construct
  source 1..26: mol_type = other DNA
gtgtctcatctctgaaaacttcccac

SEQ ID NO: 622 - DNA, 24 bp, synthetic construct
  source 1..24: mol_type = other DNA
gtcaccccattaagaggctccgtg

SEQ ID NO: 623 - DNA, 24 bp, synthetic construct
  source 1..24: mol_type = other DNA
ccacgtcaatgagcaaaggtaaat

SEQ ID NO: 624 - DNA, 24 bp, synthetic construct
  source 1..24: mol_type = other DNA
gtaagctcacaatatgtgcataaa

SEQ ID NO: 625 - DNA, 24 bp, synthetic construct
  source 1..24: mol_type = other DNA
gatacacacactgattcaggcaga

SEQ ID NO: 626 - DNA, 24 bp, synthetic construct
  source 1..24: mol_type = other DNA
agtcttggttttccggatttggga

SEQ ID NO: 627 - DNA, 27 bp, synthetic construct
  source 1..27: mol_type = other DNA
acctcagttaatgatagtgtgtcgttt

SEQ ID NO: 628 - DNA, 24 bp, synthetic construct
  source 1..24: mol_type = other DNA
gagccttggttttccggatttcgg

SEQ ID NO: 629 - DNA, 25 bp, synthetic construct
  source 1..25: mol_type = other DNA
gtatcatctctgaaaacttccgacc

SEQ ID NO: 630 - DNA, 24 bp, synthetic construct
  source 1..24: mol_type = other DNA
gtgctcagccttggttttccgcta

SEQ ID NO: 631 - DNA, 24 bp, synthetic construct
  source 1..24: mol_type = other DNA
tgcgtcaccccattaagaggcagg

SEQ ID NO: 632 - DNA, 27 bp, synthetic construct
  source 1..27: mol_type = other DNA
catgtcaatgagcaaaggtattaagaa

SEQ ID NO: 633 - DNA, 25 bp, synthetic construct
  source 1..25: mol_type = other DNA
gtaagctcacaatatgtgcattaaa

SEQ ID NO: 634 - DNA, 25 bp, synthetic construct
  source 1..25: mol_type = other DNA
gaaactaacacacacactgattgtc

SEQ ID NO: 635 - DNA, 26 bp, synthetic construct
  source 1..26: mol_type = other DNA
ctaagttaatgatagtgtgtcgattg

SEQ ID NO: 636 - DNA, 27 bp, synthetic construct
  source 1..27: mol_type = other DNA
gtgtctcatctctgaaaacttccgacc

SEQ ID NO: 637 - DNA, 24 bp, synthetic construct
  source 1..24: mol_type = other DNA
aggaaggcacattctcatctcact

SEQ ID NO: 638 - DNA, 24 bp, synthetic construct
  source 1..24: mol_type = other DNA
cgtcaccccattaagaggctcggt

SEQ ID NO: 639 - DNA, 24 bp, synthetic construct
  source 1..24: mol_type = other DNA
gcgtcaccccattaagaggctagg

SEQ ID NO: 640 - DNA, 26 bp, synthetic construct
  source 1..26: mol_type = other DNA
catgtcaatgagcaaaggtattatga

SEQ ID NO: 641 - DNA, 24 bp, synthetic construct
  source 1..24: mol_type = other DNA
taggctcacaatatgtgcattaaa

SEQ ID NO: 642 - DNA, 24 bp, synthetic construct
  source 1..24: mol_type = other DNA
tgacacacacactgattcagggag

SEQ ID NO: 643 - DNA, 43 bp, synthetic construct
  source 1..43: mol_type = other DNA
ttaatatgggtagttgggtggatgcccctcgacttgcatgaca

SEQ ID NO: 644 - DNA, 42 bp, synthetic construct
  source 1..42: mol_type = other DNA
ttaatatgggtagttgggacagggaccttcctctcagaaagg

SEQ ID NO: 645 - DNA, 42 bp, synthetic construct
  source 1..42: mol_type = other DNA
ttaatatgggtagttgggcgtgagttagccgatgcttttaga

SEQ ID NO: 646 - DNA, 42 bp, synthetic construct
  source 1..42: mol_type = other DNA
ttaatatgggtagttgggcatctgccttcgcaatcggagaag

SEQ ID NO: 647 - DNA, 42 bp, synthetic construct
  source 1..42: mol_type = other DNA
ttaatatgggtagttgggtcccctcgcgtatcatcgaatatt

SEQ ID NO: 648 - DNA, 42 bp, synthetic construct
  source 1..42: mol_type = other DNA
ttaatatgggtagttgggccctgcgctcgttatggcactatt

SEQ ID NO: 649 - DNA, 43 bp, synthetic construct
  source 1..43: mol_type = other DNA
ttaatatgggtagttgggtgtactgatgcgcgattactaggct

SEQ ID NO: 650 - DNA, 42 bp, synthetic construct
  source 1..42: mol_type = other DNA
ttaatatgggtagttgggtggcggcttccatggcttgacccc

SEQ ID NO: 651 - DNA, 43 bp, synthetic construct
  source 1..43: mol_type = other DNA
ttaatatgggtagttgggtgcttgcatgtgttaagcctgtgcg

SEQ ID NO: 652 - DNA, 42 bp, synthetic construct
  source 1..42: mol_type = other DNA
ttaatatgggtagttgggcccaccttcctctcagaacccgat

SEQ ID NO: 653 - DNA, 42 bp, synthetic construct
  source 1..42: mol_type = other DNA
gataagtaagtagggatgggatgcccctcgacttgcatgaca

SEQ ID NO: 654 - DNA, 42 bp, synthetic construct
  source 1..42: mol_type = other DNA
gataagtaagtagggatgacagggaccttcctctcagaaagg

SEQ ID NO: 655 - DNA, 42 bp, synthetic construct
  source 1..42: mol_type = other DNA
gataagtaagtagggatgcgtgagttagccgatgcttttaga

SEQ ID NO: 656 - DNA, 42 bp, synthetic construct
  source 1..42: mol_type = other DNA
gataagtaagtagggatgcatctgccttcgcaatcggagaag

SEQ ID NO: 657 - DNA, 42 bp, synthetic construct
  source 1..42: mol_type = other DNA
gataagtaagtagggatgtcccctcgcgtatcatcgaatatt

SEQ ID NO: 658 - DNA, 42 bp, synthetic construct
  source 1..42: mol_type = other DNA
gataagtaagtagggatgccctgcgctcgttatggcactatt

SEQ ID NO: 659 - DNA, 42 bp, synthetic construct
  source 1..42: mol_type = other DNA
gataagtaagtagggatggtactgatgcgcgattactaggct

SEQ ID NO: 660 - DNA, 42 bp, synthetic construct
  source 1..42: mol_type = other DNA
gataagtaagtagggatgtggcggcttccatggcttgacccc

SEQ ID NO: 661 - DNA, 42 bp, synthetic construct
  source 1..42: mol_type = other DNA
gataagtaagtagggatggcttgcatgtgttaagcctgtgcg

SEQ ID NO: 662 - DNA, 42 bp, synthetic construct
  source 1..42: mol_type = other DNA
gataagtaagtagggatgcccaccttcctctcagaacccgat

SEQ ID NO: 663 - DNA, 42 bp, synthetic construct
  source 1..42: mol_type = other DNA
atggaagtagtagaagggtcccaggttggtcacgtgttagag

SEQ ID NO: 664 - DNA, 43 bp, synthetic construct
  source 1..43: mol_type = other DNA
atggaagtagtagaagggtggacctactacctaatgggcccgc

SEQ ID NO: 665 - DNA, 43 bp, synthetic construct
  source 1..43: mol_type = other DNA
atggaagtagtagaagggtgaactgctgaaagcggtttacttg

SEQ ID NO: 666 - DNA, 42 bp, synthetic construct
  source 1..42: mol_type = other DNA
atggaagtagtagaagggaaggatatctgcgcattccacgcg

SEQ ID NO: 667 - DNA, 42 bp, synthetic construct
  source 1..42: mol_type = other DNA
atggaagtagtagaagggtaatttgagttttagccttgcccg

SEQ ID NO: 668 - DNA, 42 bp, synthetic construct
  source 1..42: mol_type = other DNA
atggaagtagtagaagggtgaatgctggcaacacgggactcc

SEQ ID NO: 669 - DNA, 42 bp, synthetic construct
  source 1..42: mol_type = other DNA
atggaagtagtagaagggccgcgggtgcagacgactcggcac

SEQ ID NO: 670 - DNA, 43 bp, synthetic construct
  source 1..43: mol_type = other DNA
atggaagtagtagaagggtggaaccctccacaccttcgaccgg

SEQ ID NO: 671 - DNA, 42 bp, synthetic construct
  source 1..42: mol_type = other DNA
atggaagtagtagaagggcccaggttggtcacgtgttacagt

SEQ ID NO: 672 - DNA, 43 bp, synthetic construct
  source 1..43: mol_type = other DNA
atggaagtagtagaagggtggactactacctaatgggccggct

SEQ ID NO: 673 - DNA, 42 bp, synthetic construct
  source 1..42: mol_type = other DNA
tagaattagagagatgggtcccaggttggtcacgtgttagag

SEQ ID NO: 674 - DNA, 43 bp, synthetic construct
  source 1..43: mol_type = other DNA
tagaattagagagatgggtggacctactacctaatgggcccgc

SEQ ID NO: 675 - DNA, 43 bp, synthetic construct
  source 1..43: mol_type = other DNA
tagaattagagagatgggtgaactgctgaaagcggtttacttg

SEQ ID NO: 676 - DNA, 42 bp, synthetic construct
  source 1..42: mol_type = other DNA
tagaattagagagatgggaaggatatctgcgcattccacgcg

SEQ ID NO: 677 - DNA, 42 bp, synthetic construct
  source 1..42: mol_type = other DNA
tagaattagagagatgggtaatttgagttttagccttgcccg

SEQ ID NO: 678 - DNA, 42 bp, synthetic construct
  source 1..42: mol_type = other DNA
tagaattagagagatgggtgaatgctggcaacacgggactcc

SEQ ID NO: 679 - DNA, 42 bp, synthetic construct
  source 1..42: mol_type = other DNA
tagaattagagagatgggccgcgggtgcagacgactcggcac

SEQ ID NO: 680 - DNA, 43 bp, synthetic construct
  source 1..43: mol_type = other DNA
tagaattagagagatgggtggaaccctccacaccttcgaccgg

SEQ ID NO: 681 - DNA, 42 bp, synthetic construct
  source 1..42: mol_type = other DNA
tagaattagagagatgggcccaggttggtcacgtgttacagt

SEQ ID NO: 682 - DNA, 43 bp, synthetic construct
  source 1..43: mol_type = other DNA
tagaattagagagatgggtggactactacctaatgggccggct

SEQ ID NO: 683 - DNA, 43 bp, synthetic construct
  source 1..43: mol_type = other DNA
ggaatttagtgagaagggttattcgatactatgcggtatttta

SEQ ID NO: 684 - DNA, 43 bp, synthetic construct
  source 1..43: mol_type = other DNA
ggaatttagtgagaagggcaaccccattgtgaatgattctgct

SEQ ID NO: 685 - DNA, 43 bp, synthetic construct
  source 1..43: mol_type = other DNA
ggaatttagtgagaagggtggaccattactctagtctcgctca

SEQ ID NO: 686 - DNA, 42 bp, synthetic construct
  source 1..42: mol_type = other DNA
ggaatttagtgagaagggcaccctctcgatatctacgcaaaa

SEQ ID NO: 687 - DNA, 43 bp, synthetic construct
  source 1..43: mol_type = other DNA
ggaatttagtgagaagggtgcgccgaagagtcgcatgcttagt

SEQ ID NO: 688 - DNA, 43 bp, synthetic construct
  source 1..43: mol_type = other DNA
ggaatttagtgagaagggtggaggcataagggccatactgtgg

SEQ ID NO: 689 - DNA, 42 bp, synthetic construct
  source 1..42: mol_type = other DNA
ggaatttagtgagaagggcgctggcttcagatacttcggcac

SEQ ID NO: 690 - DNA, 43 bp, synthetic construct
  source 1..43: mol_type = other DNA
ggaatttagtgagaagggtggttaccagtctcaccttaggtgg

SEQ ID NO: 691 - DNA, 44 bp, synthetic construct
  source 1..44: mol_type = other DNA
ggaatttagtgagaagggttattcgatactatgcggtattatag

SEQ ID NO: 692 - DNA, 43 bp, synthetic construct
  source 1..43: mol_type = other DNA
ggaatttagtgagaagggaaacccattgtgaatgattctcctg

SEQ ID NO: 693 - DNA, 43 bp, synthetic construct
  source 1..43: mol_type = other DNA
tgtaatagtaaggagggattattcgatactatgcggtatttta

SEQ ID NO: 694 - DNA, 43 bp, synthetic construct
  source 1..43: mol_type = other DNA
tgtaatagtaaggagggacaaccccattgtgaatgattctgct

SEQ ID NO: 695 - DNA, 42 bp, synthetic construct
  source 1..42: mol_type = other DNA
tgtaatagtaaggagggaggaccattactctagtctcgctca

SEQ ID NO: 696 - DNA, 42 bp, synthetic construct
  source 1..42: mol_type = other DNA
tgtaatagtaaggagggacaccctctcgatatctacgcaaaa

SEQ ID NO: 697 - DNA, 42 bp, synthetic construct
  source 1..42: mol_type = other DNA
tgtaatagtaaggagggagcgccgaagagtcgcatgcttagt

SEQ ID NO: 698 - DNA, 42 bp, synthetic construct
  source 1..42: mol_type = other DNA
tgtaatagtaaggagggaggaggcataagggccatactgtgg

SEQ ID NO: 699 - DNA, 42 bp, synthetic construct
  source 1..42: mol_type = other DNA
tgtaatagtaaggagggacgctggcttcagatacttcggcac

SEQ ID NO: 700 - DNA, 42 bp, synthetic construct
  source 1..42: mol_type = other DNA
tgtaatagtaaggagggaggttaccagtctcaccttaggtgg

SEQ ID NO: 701 - DNA, 44 bp, synthetic construct
  source 1..44: mol_type = other DNA
tgtaatagtaaggagggattattcgatactatgcggtattatag

SEQ ID NO: 702 - DNA, 43 bp, synthetic construct
  source 1..43: mol_type = other DNA
tgtaatagtaaggagggaaaacccattgtgaatgattctcctg

SEQ ID NO: 703 - DNA, 42 bp, synthetic construct
  source 1..42: mol_type = other DNA
gtaatagatatgagggtgtagcgcgttactcacccgtcccgg

SEQ ID NO: 704 - DNA, 42 bp, synthetic construct
  source 1..42: mol_type = other DNA
gtaatagatatgagggtgaacgaagattccctactgctggga

SEQ ID NO: 705 - DNA, 42 bp, synthetic construct
  source 1..42: mol_type = other DNA
gtaatagatatgagggtggcggccacctacgtattaccggcc

SEQ ID NO: 706 - DNA, 42 bp, synthetic construct
  source 1..42: mol_type = other DNA
gtaatagatatgagggtgaagcgctacactaggaattcccga

SEQ ID NO: 707 - DNA, 42 bp, synthetic construct
  source 1..42: mol_type = other DNA
gtaatagatatgagggtggcgtgcttcgaattaaaccactac

SEQ ID NO: 708 - DNA, 42 bp, synthetic construct
  source 1..42: mol_type = other DNA
gtaatagatatgagggtgaacggacttaacccaacatctgtg

SEQ ID NO: 709 - DNA, 42 bp, synthetic construct
  source 1..42: mol_type = other DNA
gtaatagatatgagggtgggtcattgtagcacgtgtgtacgg

SEQ ID NO: 710 - DNA, 42 bp, synthetic construct
  source 1..42: mol_type = other DNA
gtaatagatatgagggtgtgtctctcatggtgtgacgggacc

SEQ ID NO: 711 - DNA, 42 bp, synthetic construct
  source 1..42: mol_type = other DNA
gtaatagatatgagggtgacgacgcgttactcacccgtcgcg

SEQ ID NO: 712 - DNA, 42 bp, synthetic construct
  source 1..42: mol_type = other DNA
gtaatagatatgagggtgcaaccctctcaggtcggctaccgt

SEQ ID NO: 713 - DNA, 42 bp, synthetic construct
  source 1..42: mol_type = other DNA
atgtattaagaggagggatagcgcgttactcacccgtcccgg

SEQ ID NO: 714 - DNA, 42 bp, synthetic construct
  source 1..42: mol_type = other DNA
atgtattaagaggagggaaacgaagattccctactgctggga

SEQ ID NO: 715 - DNA, 42 bp, synthetic construct
  source 1..42: mol_type = other DNA
atgtattaagaggagggagcggccacctacgtattaccggcc

SEQ ID NO: 716 - DNA, 42 bp, synthetic construct
  source 1..42: mol_type = other DNA
atgtattaagaggagggaaagcgctacactaggaattcccga

SEQ ID NO: 717 - DNA, 42 bp, synthetic construct
  source 1..42: mol_type = other DNA
atgtattaagaggagggagcgtgcttcgaattaaaccactac

SEQ ID NO: 718 - DNA, 42 bp, synthetic construct
  source 1..42: mol_type = other DNA
atgtattaagaggagggaaacggacttaacccaacatctgtg

SEQ ID NO: 719 - DNA, 42 bp, synthetic construct
  source 1..42: mol_type = other DNA
atgtattaagaggagggaggtcattgtagcacgtgtgtacgg

SEQ ID NO: 720 - DNA, 42 bp, synthetic construct
  source 1..42: mol_type = other DNA
atgtattaagaggagggatgtctctcatggtgtgacgggacc

SEQ ID NO: 721 - DNA, 42 bp, synthetic construct
  source 1..42: mol_type = other DNA
atgtattaagaggagggaacgacgcgttactcacccgtcgcg

SEQ ID NO: 722 - DNA, 42 bp, synthetic construct
  source 1..42: mol_type = other DNA
atgtattaagaggagggacaaccctctcaggtcggctaccgt

SEQ ID NO: 723 - DNA, 43 bp, synthetic construct
  source 1..43: mol_type = other DNA
ggtaattgagtagaagggtgtcccctccttaagcagatctgag

SEQ ID NO: 724 - DNA, 44 bp, synthetic construct
  source 1..44: mol_type = other DNA
ggtaattgagtagaagggtgtacgaataacttcttcgttcagcg

SEQ ID NO: 725 - DNA, 42 bp, synthetic construct
  source 1..42: mol_type = other DNA
ggtaattgagtagaagggtcttactatgccatctacgcaagg

SEQ ID NO: 726 - DNA, 43 bp, synthetic construct
  source 1..43: mol_type = other DNA
ggtaattgagtagaagggtgacctctgtcatactctagctaac

SEQ ID NO: 727 - DNA, 43 bp, synthetic construct
  source 1..43: mol_type = other DNA
ggtaattgagtagaagggtgtgcctgtatgcacgctatccagg

SEQ ID NO: 728 - DNA, 43 bp, synthetic construct
  source 1..43: mol_type = other DNA
ggtaattgagtagaagggcgaggtcatatagggcatgatgtaa

SEQ ID NO: 729 - DNA, 43 bp, synthetic construct
  source 1..43: mol_type = other DNA
ggtaattgagtagaagggtgctccatcttcatgaagtcgacaa

SEQ ID NO: 730 - DNA, 42 bp, synthetic construct
  source 1..42: mol_type = other DNA
ggtaattgagtagaagggtgctccctctttcgttaggcctgg

SEQ ID NO: 731 - DNA, 42 bp, synthetic construct
  source 1..42: mol_type = other DNA
ggtaattgagtagaagggcgacctcgtcttaagggtaggaat

SEQ ID NO: 732 - DNA, 43 bp, synthetic construct
  source 1..43: mol_type = other DNA
ggtaattgagtagaagggtgtacgaataacttcttcgttctgc

SEQ ID NO: 733 - DNA, 42 bp, synthetic construct
  source 1..42: mol_type = other DNA
ttgtaaaatagggagggagtcccctccttaagcagatctgag

SEQ ID NO: 734 - DNA, 43 bp, synthetic construct
  source 1..43: mol_type = other DNA
ttgtaaaatagggagggagtacgaataacttcttcgttcagcg

SEQ ID NO: 735 - DNA, 42 bp, synthetic construct
  source 1..42: mol_type = other DNA
ttgtaaaatagggagggatcttactatgccatctacgcaagg

SEQ ID NO: 736 - DNA, 43 bp, synthetic construct
  source 1..43: mol_type = other DNA
ttgtaaaatagggagggatgacctctgtcatactctagctaac

SEQ ID NO: 737 - DNA, 42 bp, synthetic construct
  source 1..42: mol_type = other DNA
ttgtaaaatagggagggagtgcctgtatgcacgctatccagg

SEQ ID NO: 738 - DNA, 43 bp, synthetic construct
  source 1..43: mol_type = other DNA
ttgtaaaatagggagggacgaggtcatatagggcatgatgtaa

SEQ ID NO: 739 - DNA, 42 bp, synthetic construct
  source 1..42: mol_type = other DNA
ttgtaaaatagggagggagctccatcttcatgaagtcgacaa

SEQ ID NO: 740 - DNA, 42 bp, synthetic construct
  source 1..42: mol_type = other DNA
ttgtaaaatagggagggatgctccctctttcgttaggcctgg

SEQ ID NO: 741 - DNA, 42 bp, synthetic construct
  source 1..42: mol_type = other DNA
ttgtaaaatagggagggacgacctcgtcttaagggtaggaat

SEQ ID NO: 742 - DNA, 43 bp, synthetic construct
  source 1..43: mol_type = other DNA
ttgtaaaatagggagggatgtacgaataacttcttcgttctgc

SEQ ID NO: 743 - DNA, 42 bp, synthetic construct
  source 1..42: mol_type = other DNA
tgtataggattagaagggacacccacgagcggacacgttggc

SEQ ID NO: 744 - DNA, 43 bp, synthetic construct
  source 1..43: mol_type = other DNA
tgtataggattagaagggtgtgggaatagctggatcaggcaac

SEQ ID NO: 745 - DNA, 43 bp, synthetic construct
  source 1..43: mol_type = other DNA
tgtataggattagaagggcaaccggtgcttattcttagagatg

SEQ ID NO: 746 - DNA, 43 bp, synthetic construct
  source 1..43: mol_type = other DNA
tgtataggattagaagggtgtgccctctgacacactctagagc

SEQ ID NO: 747 - DNA, 42 bp, synthetic construct
  source 1..42: mol_type = other DNA
tgtataggattagaagggaatagagcttcctgacatgtcttc

SEQ ID NO: 748 - DNA, 43 bp, synthetic construct
  source 1..43: mol_type = other DNA
tgtataggattagaagggtggatcgtagcaactagtgacatcc

SEQ ID NO: 749 - DNA, 43 bp, synthetic construct
  source 1..43: mol_type = other DNA
tgtataggattagaagggtgacatccggactacgatcggtaaa

SEQ ID NO: 750 - DNA, 42 bp, synthetic construct
  source 1..42: mol_type = other DNA
tgtataggattagaagggccaggctaacgacttctggtattg

SEQ ID NO: 751 - DNA, 42 bp, synthetic construct
  source 1..42: mol_type = other DNA
tgtataggattagaagggaacccccacgagcggacacgtagg

SEQ ID NO: 752 - DNA, 43 bp, synthetic construct
  source 1..43: mol_type = other DNA
tgtataggattagaagggtgcgaatagctggatcaggcttcgc

SEQ ID NO: 753 - DNA, 42 bp, synthetic construct
  source 1..42: mol_type = other DNA
tatagttatggagaagggacacccacgagcggacacgttggc

SEQ ID NO: 754 - DNA, 43 bp, synthetic construct
  source 1..43: mol_type = other DNA
tatagttatggagaagggtgtgggaatagctggatcaggcaac

SEQ ID NO: 755 - DNA, 43 bp, synthetic construct
  source 1..43: mol_type = other DNA
tatagttatggagaagggcaaccggtgcttattcttagagatg

SEQ ID NO: 756 - DNA, 43 bp, synthetic construct
  source 1..43: mol_type = other DNA
tatagttatggagaagggtgtgccctctgacacactctagagc

SEQ ID NO: 757 - DNA, 42 bp, synthetic construct
  source 1..42: mol_type = other DNA
tatagttatggagaagggaatagagcttcctgacatgtcttc

SEQ ID NO: 758 - DNA, 43 bp, synthetic construct
  source 1..43: mol_type = other DNA
tatagttatggagaagggtggatcgtagcaactagtgacatcc

SEQ ID NO: 759 - DNA, 43 bp, synthetic construct
  source 1..43: mol_type = other DNA
tatagttatggagaagggtgacatccggactacgatcggtaaa

SEQ ID NO: 760 - DNA, 42 bp, synthetic construct
  source 1..42: mol_type = other DNA
tatagttatggagaagggccaggctaacgacttctggtattg

SEQ ID NO: 761 - DNA, 42 bp, synthetic construct
  source 1..42: mol_type = other DNA
tatagttatggagaagggaacccccacgagcggacacgtagg

SEQ ID NO: 762 - DNA, 43 bp, synthetic construct
  source 1..43: mol_type = other DNA
tatagttatggagaagggtgcgaatagctggatcaggcttcgc

SEQ ID NO: 763 - DNA, 25 bp, synthetic construct
  source 1..25: mol_type = other DNA
  misc_feature 1: note = 5' Alexa Fluor dye 488 (NHS Ester)
cccttctactcaattacctcatccc

SEQ ID NO: 764 - DNA, 25 bp, synthetic construct
  source 1..25: mol_type = other DNA
  misc_feature 1: note = 5' Alexa Fluor dye 546 (NHS Ester)
cccatctcactatcttatcacccac

SEQ ID NO: 765 - DNA, 25 bp, synthetic construct
  source 1..25: mol_type = other DNA
  misc_feature 1: note = 5' Alexa Fluor dye 647 (NHS Ester)
cccactcaacatatcattccaccac

SEQ ID NO: 766 - DNA, 25 bp, synthetic construct
  source 1..25: mol_type = other DNA
  misc_feature 1: note = 5' Alexa Fluor dye 532 (NHS Ester)
cccaactatactctatcctccatcc

SEQ ID NO: 767 - DNA, 25 bp, synthetic construct
  source 1..25: mol_type = other DNA
  misc_feature 1: note = 5' Alexa Fluor dye 546 (NHS Ester)
cctcaccctaataatactccaaccc

SEQ ID NO: 768 - DNA, 25 bp, synthetic construct
  source 1..25: mol_type = other DNA
gggatgaggtaattgagtagaaggg

SEQ ID NO: 769 - DNA, 25 bp, synthetic construct
  source 1..25: mol_type = other DNA
gtgggtgataagatagtgagatggg

SEQ ID NO: 770 - DNA, 25 bp, synthetic construct
  source 1..25: mol_type = other DNA
gtggtggaatgatatgttgagtggg

SEQ ID NO: 771 - DNA, 25 bp, synthetic construct
  source 1..25: mol_type = other DNA
ggatggaggatagagtatagttggg

SEQ ID NO: 772 - DNA, 60 bp, synthetic construct
  source 1..60: mol_type = other DNA
gtaatagatatgagggtgcggagcgtcagtagggcgccgcattgggagggtaatagatat

SEQ ID NO: 773 - DNA, 63 bp, synthetic construct
  source 1..63: mol_type = other DNA
gtaatagatatgagggtgcgcacgcggtattagacggaatttgaatgggagggtaatagatat

SEQ ID NO: 774 - DNA, 60 bp, synthetic construct
  source 1..60: mol_type = other DNA
gtaatagatatgagggtggaccccccgctgcccctcgacaactgggagggtaatagatat

SEQ ID NO: 775 - DNA, 62 bp, synthetic construct
  source 1..62: mol_type = other DNA
gtaatagatatgagggtgcgcacgcggtattagacggaattagatgggagggtaatagatat

SEQ ID NO: 776 - DNA, 60 bp, synthetic construct
  source 1..60: mol_type = other DNA
gtaatagatatgagggtgaatccgccgactagctaatgccggtgggagggtaatagatat

SEQ ID NO: 777 - DNA, 60 bp, synthetic construct
  source 1..60: mol_type = other DNA
gtaatagatatgagggtgcgtcttgctccccggcaaaagtcctgggagggtaatagatat

SEQ ID NO: 778 - DNA, 61 bp, synthetic construct
  source 1..61: mol_type = other DNA
gtaatagatatgagggtggaccccccgctgcccctcgactacgtgggagggtaatagatat

SEQ ID NO: 779 - DNA, 60 bp, synthetic construct
  source 1..60: mol_type = other DNA
gtaatagatatgagggtgatgcgccgactagctaatgcgggctgggagggtaatagatat

SEQ ID NO: 780 - DNA, 60 bp, synthetic construct
  source 1..60: mol_type = other DNA
atgtattaagaggagggacggagcgtcagtagggcgccgcatgaggaggatgtattaaga

SEQ ID NO: 781 - DNA, 63 bp, synthetic construct
  source 1..63: mol_type = other DNA
atgtattaagaggagggacgcacgcggtattagacggaatttgaagaggaggatgtattaaga

SEQ ID NO: 782 - DNA, 60 bp, synthetic construct
  source 1..60: mol_type = other DNA
atgtattaagaggagggagaccccccgctgcccctcgacaacgaggaggatgtattaaga

SEQ ID NO: 783 - DNA, 62 bp, synthetic construct
  source 1..62: mol_type = other DNA
atgtattaagaggagggacgcacgcggtattagacggaattagagaggaggatgtattaaga

SEQ ID NO: 784 - DNA, 60 bp, synthetic construct
  source 1..60: mol_type = other DNA
atgtattaagaggagggaaatccgccgactagctaatgccgggaggaggatgtattaaga

SEQ ID NO: 785 - DNA, 60 bp, synthetic construct
  source 1..60: mol_type = other DNA
atgtattaagaggagggacgtcttgctccccggcaaaagtccgaggaggatgtattaaga

SEQ ID NO: 786 - DNA, 61 bp, synthetic construct
  source 1..61: mol_type = other DNA
atgtattaagaggagggagaccccccgctgcccctcgactacggaggaggatgtattaaga

SEQ ID NO: 787 - DNA, 60 bp, synthetic construct
  source 1..60: mol_type = other DNA
atgtattaagaggagggaatgcgccgactagctaatgcgggcgaggaggatgtattaaga

SEQ ID NO: 788 - DNA, 60 bp, synthetic construct
  source 1..60: mol_type = other DNA
tgtaatagtaaggagggaggcgttaagccccggcatttctgagggtgagtgtaatagtaa

SEQ ID NO: 789 - DNA, 61 bp, synthetic construct
  source 1..61: mol_type = other DNA
tgtaatagtaaggagggaccacccaacacctagtaatcatgcagggtgagtgtaatagtaa

SEQ ID NO: 790 - DNA, 60 bp, synthetic construct
  source 1..60: mol_type = other DNA
tgtaatagtaaggagggacttgaaagtgactttgctcacagcgggtgagtgtaatagtaa

SEQ ID NO: 791 - DNA, 61 bp, synthetic construct
  source 1..61: mol_type = other DNA
tgtaatagtaaggagggagcagtagccctgatcataaggccgtgggtgagtgtaatagtaa

SEQ ID NO: 792 - DNA, 61 bp, synthetic construct
  source 1..61: mol_type = other DNA
tgtaatagtaaggagggacctcatcgtataccaccagagtaaagggtgagtgtaatagtaa

SEQ ID NO: 793 - DNA, 60 bp, synthetic construct
  source 1..60: mol_type = other DNA
tgtaatagtaaggagggaagatgcactctagctgcacagaaagggtgagtgtaatagtaa

SEQ ID NO: 794 - DNA, 60 bp, synthetic construct
  source 1..60: mol_type = other DNA
tgtaatagtaaggagggagagctgcactctagctgcacacaagggtgagtgtaatagtaa

SEQ ID NO: 795 - DNA, 60 bp, synthetic construct
  source 1..60: mol_type = other DNA
tgtaatagtaaggagggacctcatcgtataccaccagagaaagggtgagtgtaatagtaa

SEQ ID NO: 796 - DNA, 61 bp, synthetic construct
  source 1..61: mol_type = other DNA
tatagttatggagaagggtggcgttaagccccggcatttctgaggaagggtatagttatgg

SEQ ID NO: 797 - DNA, 61 bp, synthetic construct
  source 1..61: mol_type = other DNA
tatagttatggagaagggccacccaacacctagtaatcatgcaggaagggtatagttatgg

SEQ ID NO: 798 - DNA, 60 bp, synthetic construct
  source 1..60: mol_type = other DNA
tatagttatggagaagggcttgaaagtgactttgctcacagcggaagggtatagttatgg

SEQ ID NO: 799 - DNA, 61 bp, synthetic construct
  source 1..61: mol_type = other DNA
tatagttatggagaagggtgcagtagccctgatcataaggccgggaagggtatagttatgg

SEQ ID NO: 800 - DNA, 61 bp, synthetic construct
  source 1..61: mol_type = other DNA
tatagttatggagaagggcctcatcgtataccaccagagtaaaggaagggtatagttatgg

SEQ ID NO: 801 - DNA, 60 bp, synthetic construct
  source 1..60: mol_type = other DNA
tatagttatggagaagggagatgcactctagctgcacagaaaggaagggtatagttatgg

SEQ ID NO: 802 - DNA, 61 bp, synthetic construct
  source 1..61: mol_type = other DNA
tatagttatggagaagggtgagctgcactctagctgcacacaaggaagggtatagttatgg

SEQ ID NO: 803 - DNA, 60 bp, synthetic construct
  source 1..60: mol_type = other DNA
tatagttatggagaagggcctcatcgtataccaccagagaaaggaagggtatagttatgg

SEQ ID NO: 804 - DNA, 61 bp, synthetic construct
  source 1..61: mol_type = other DNA
ttaatatgggtagttgggtggagaaaggcaggttcctcaccgcgggtgtgttaatatgggt

SEQ ID NO: 805 - DNA, 61 bp, synthetic construct
  source 1..61: mol_type = other DNA
ttaatatgggtagttgggttcgtaccgtcttctgctcttaggtgggtgtgttaatatgggt

SEQ ID NO: 806 - DNA, 60 bp, synthetic construct
  source 1..60: mol_type = other DNA
ttaatatgggtagttgggtccccgtcttctgctcttcccggagggtgtgttaatatgggt

SEQ ID NO: 807 - DNA, 62 bp, synthetic construct
  source 1..62: mol_type = other DNA
ttaatatgggtagttgggtggagaaaggcaggttcctcacggcagggtgtgttaatatgggt

SEQ ID NO: 808 - DNA, 61 bp, synthetic construct
  source 1..61: mol_type = other DNA
ttaatatgggtagttgggattcacataatccaccgcttgacgtgggtgtgttaatatgggt

SEQ ID NO: 809 - DNA, 60 bp, synthetic construct
  source 1..60: mol_type = other DNA
ttaatatgggtagttgggccctcagtccccgcacacctacatgggtgtgttaatatgggt

SEQ ID NO: 810 - DNA, 62 bp, synthetic construct
  source 1..62: mol_type = other DNA
ttaatatgggtagttgggtctaacagtttcaaatgcagttgtgtgggtgtgttaatatgggt

SEQ ID NO: 811 - DNA, 64 bp, synthetic construct
  source 1..64: mol_type = other DNA
ttaatatgggtagttgggtggaggatttcacatctgacttgtaagtgggtgtgttaatatgggt

SEQ ID NO: 812 - DNA, 61 bp, synthetic construct
  source 1..61: mol_type = other DNA
aatgatatgttgagtgggtggagaaaggcaggttcctcaccgcgtggtggaatgatatgtt

SEQ ID NO: 813 - DNA, 60 bp, synthetic construct
  source 1..60: mol_type = other DNA
aatgatatgttgagtgggttcgtaccgtcttctgctcttagggtggtggaatgatatgtt

SEQ ID NO: 814 - DNA, 60 bp, synthetic construct
  source 1..60: mol_type = other DNA
aatgatatgttgagtgggtccccgtcttctgctcttcccggagtggtggaatgatatgtt

SEQ ID NO: 815 - DNA, 62 bp, synthetic construct
  source 1..62: mol_type = other DNA
aatgatatgttgagtgggtggagaaaggcaggttcctcacggcagtggtggaatgatatgtt

SEQ ID NO: 816 - DNA, 60 bp, synthetic construct
  source 1..60: mol_type = other DNA
aatgatatgttgagtgggattcacataatccaccgcttgacggtggtggaatgatatgtt

SEQ ID NO: 817 - DNA, 60 bp, synthetic construct
  source 1..60: mol_type = other DNA
aatgatatgttgagtgggccctcagtccccgcacacctacatgtggtggaatgatatgtt

SEQ ID NO: 818 - DNA, 61 bp, synthetic construct
  source 1..61: mol_type = other DNA
aatgatatgttgagtgggtctaacagtttcaaatgcagttgtggtggtggaatgatatgtt

SEQ ID NO: 819 - DNA, 63 bp, synthetic construct
  source 1..63: mol_type = other DNA
aatgatatgttgagtgggtggaggatttcacatctgacttgtaaggtggtggaatgatatgtt

SEQ ID NO: 820 - DNA, 62 bp, synthetic construct
  source 1..62: mol_type = other DNA
tgtataggattagaagggtgagagaacccctagacatcgtgcgtgggtgagtgtataggatt

SEQ ID NO: 821 - DNA, 61 bp, synthetic construct
  source 1..61: mol_type = other DNA
tgtataggattagaagggacgcagcgtcagttgggcgccgcatgggtgagtgtataggatt

SEQ ID NO: 822 - DNA, 61 bp, synthetic construct
  source 1..61: mol_type = other DNA
tgtataggattagaagggatgaacgctttcgctgtgccaaggtgggtgagtgtataggatt

SEQ ID NO: 823 - DNA, 62 bp, synthetic construct
  source 1..62: mol_type = other DNA
tgtataggattagaagggtggcagtctcgacagagtcctctcgtgggtgagtgtataggatt

SEQ ID NO: 824 - DNA, 60 bp, synthetic construct
  source 1..60: mol_type = other DNA
tgtataggattagaagggacggtgttaggcctgtcgctacgcgggtgagtgtataggatt

SEQ ID NO: 825 - DNA, 60 bp, synthetic construct
  source 1..60: mol_type = other DNA
tgtataggattagaagggcgttgttaggcctgtcgctaggcagggtgagtgtataggatt

SEQ ID NO: 826 - DNA, 61 bp, synthetic construct
  source 1..61: mol_type = other DNA
tgtataggattagaagggcggctagctaatgtcacgcatcggtgggtgagtgtataggatt

SEQ ID NO: 827 - DNA, 60 bp, synthetic construct
  source 1..60: mol_type = other DNA
tgtataggattagaagggatgctcgcccactcaagaccgagtgggtgagtgtataggatt

SEQ ID NO: 828 - DNA, 61 bp, synthetic construct
  source 1..61: mol_type = other DNA
tagaattagagagatgggtgagagaacccctagacatcgtgcgggtggagtagaattagag

SEQ ID NO: 829 - DNA, 61 bp, synthetic construct
  source 1..61: mol_type = other DNA
tagaattagagagatgggacgcagcgtcagttgggcgccgcatggtggagtagaattagag

SEQ ID NO: 830 - DNA, 61 bp, synthetic construct
  source 1..61: mol_type = other DNA
tagaattagagagatgggatgaacgctttcgctgtgccaaggtggtggagtagaattagag

SEQ ID NO: 831 - DNA, 61 bp, synthetic construct
  source 1..61: mol_type = other DNA
tagaattagagagatgggtggcagtctcgacagagtcctctcgggtggagtagaattagag

SEQ ID NO: 832 - DNA, 60 bp, synthetic construct
  source 1..60: mol_type = other DNA
tagaattagagagatgggacggtgttaggcctgtcgctacgcggtggagtagaattagag

SEQ ID NO: 833 - DNA, 60 bp, synthetic construct
  source 1..60: mol_type = other DNA
tagaattagagagatgggcgttgttaggcctgtcgctaggcaggtggagtagaattagag

SEQ ID NO: 834 - DNA, 61 bp, synthetic construct
  source 1..61: mol_type = other DNA
tagaattagagagatgggcggctagctaatgtcacgcatcggtggtggagtagaattagag

SEQ ID NO: 835 - DNA, 60 bp, synthetic construct
  source 1..60: mol_type = other DNA
tagaattagagagatgggatgctcgcccactcaagaccgagtggtggagtagaattagag

SEQ ID NO: 836 - DNA, 61 bp, synthetic construct
  source 1..61: mol_type = other DNA
ggaatttagtgagaagggacgtgaaactataccatcgggttaagggtgttggaatttagtg

SEQ ID NO: 837 - DNA, 60 bp, synthetic construct
  source 1..60: mol_type = other DNA
ggaatttagtgagaagggtaggcggtgaaactataccatgccgggtgttggaatttagtg

SEQ ID NO: 838 - DNA, 63 bp, synthetic construct
  source 1..63: mol_type = other DNA
ggaatttagtgagaagggtgtaaaaatggtatgcataccaaagaagggtgttggaatttagtg

SEQ ID NO: 839 - DNA, 63 bp, synthetic construct
  source 1..63: mol_type = other DNA
ggaatttagtgagaagggtttggtatgcataccaaactttaaagtgggtgttggaatttagtg

SEQ ID NO: 840 - DNA, 61 bp, synthetic construct
  source 1..61: mol_type = other DNA
ggaatttagtgagaagggtacgtgaaactataccatcgggatagggtgttggaatttagtg

SEQ ID NO: 841 - DNA, 61 bp, synthetic construct
  source 1..61: mol_type = other DNA
ggaatttagtgagaagggtgtatggtatgcataccaaactaatgggtgttggaatttagtg

SEQ ID NO: 842 - DNA, 61 bp, synthetic construct
  source 1..61: mol_type = other DNA
ggaatttagtgagaagggcgcgaaactataccatcgggtaaatgggtgttggaatttagtg

SEQ ID NO: 843 - DNA, 62 bp, synthetic construct
  source 1..62: mol_type = other DNA
ggaatttagtgagaagggcattacaaaatggtatgcatacctttgggtgttggaatttagtg

SEQ ID NO: 844 - DNA, 61 bp, synthetic construct
  source 1..61: mol_type = other DNA
ggatagagtatagttgggacgtgaaactataccatcgggttaaggatggaggatagagtat

SEQ ID NO: 845 - DNA, 60 bp, synthetic construct
  source 1..60: mol_type = other DNA
ggatagagtatagttgggtaggcggtgaaactataccatgccggatggaggatagagtat

SEQ ID NO: 846 - DNA, 63 bp, synthetic construct
  source 1..63: mol_type = other DNA
ggatagagtatagttgggtgtaaaaatggtatgcataccaaagaaggatggaggatagagtat

SEQ ID NO: 847 - DNA, 62 bp, synthetic construct
  source 1..62: mol_type = other DNA
ggatagagtatagttgggtttggtatgcataccaaactttaaagggatggaggatagagtat

SEQ ID NO: 848 - DNA, 61 bp, synthetic construct
  source 1..61: mol_type = other DNA
ggatagagtatagttgggtacgtgaaactataccatcgggataggatggaggatagagtat

SEQ ID NO: 849 - DNA, 61 bp, synthetic construct
  source 1..61: mol_type = other DNA
ggatagagtatagttgggtgtatggtatgcataccaaactaatggatggaggatagagtat

SEQ ID NO: 850 - DNA, 61 bp, synthetic construct
  source 1..61: mol_type = other DNA
ggatagagtatagttgggcgcgaaactataccatcgggtaaatggatggaggatagagtat

SEQ ID NO: 851 - DNA, 62 bp, synthetic construct
  source 1..62: mol_type = other DNA
ggatagagtatagttgggcattacaaaatggtatgcatacctttggatggaggatagagtat

SEQ ID NO: 852 - DNA, 63 bp, synthetic construct
  source 1..63: mol_type = other DNA
ggtaattgagtagaagggaatgggtattagtaccaatttctctcagggatgaggtaattgagt

SEQ ID NO: 853 - DNA, 60 bp, synthetic construct
  source 1..60: mol_type = other DNA
ggtaattgagtagaagggcgtccttcgcagggtagctgcggagggatgaggtaattgagt

SEQ ID NO: 854 - DNA, 60 bp, synthetic construct
  source 1..60: mol_type = other DNA
ggtaattgagtagaagggcgggaagggaaacgctctttcttcgggatgaggtaattgagt

SEQ ID NO: 855 - DNA, 62 bp, synthetic construct
  source 1..62: mol_type = other DNA
ggtaattgagtagaagggtgcgaccgcaactattctctagaggtgggatgaggtaattgagt

SEQ ID NO: 856 - DNA, 66 bp, synthetic construct
  source 1..66: mol_type = other DNA
ggtaattgagtagaagggtggaacatttcacctctaacttatcattgtgggatgaggtaattgagt

SEQ ID NO: 857 - DNA, 62 bp, synthetic construct
  source 1..62: mol_type = other DNA
ggtaattgagtagaagggcggtccttattcgtacgatacttagtgggatgaggtaattgagt

SEQ ID NO: 858 - DNA, 61 bp, synthetic construct
  source 1..61: mol_type = other DNA
ggtaattgagtagaagggtgtccccctatgtatcgtcgccaacgggatgaggtaattgagt

SEQ ID NO: 859 - DNA, 64 bp, synthetic construct
  source 1..64: mol_type = other DNA
ggtaattgagtagaagggaatgggtattagtaccaatttctcacacgggatgaggtaattgagt

SEQ ID NO: 860 - DNA, 63 bp, synthetic construct
  source 1..63: mol_type = other DNA
agtattattagggtgaggaatgggtattagtaccaatttctctcagggttggagtattattag

SEQ ID NO: 861 - DNA, 60 bp, synthetic construct
  source 1..60: mol_type = other DNA
agtattattagggtgaggcgtccttcgcagggtagctgcggagggttggagtattattag

SEQ ID NO: 862 - DNA, 60 bp, synthetic construct
  source 1..60: mol_type = other DNA
agtattattagggtgaggcgggaagggaaacgctctttcttcgggttggagtattattag

SEQ ID NO: 863 - DNA, 61 bp, synthetic construct
  source 1..61: mol_type = other DNA
agtattattagggtgagggcgaccgcaactattctctagaggtgggttggagtattattag

SEQ ID NO: 864 - DNA, 66 bp, synthetic construct
  source 1..66: mol_type = other DNA
agtattattagggtgaggtggaacatttcacctctaacttatcattgtgggttggagtattattag

SEQ ID NO: 865 - DNA, 62 bp, synthetic construct
  source 1..62: mol_type = other DNA
agtattattagggtgaggcggtccttattcgtacgatacttagtgggttggagtattattag

SEQ ID NO: 866 - DNA, 60 bp, synthetic construct
  source 1..60: mol_type = other DNA
agtattattagggtgagggtccccctatgtatcgtcgccaacgggttggagtattattag

SEQ ID NO: 867 - DNA, 64 bp, synthetic construct
  source 1..64: mol_type = other DNA
agtattattagggtgaggaatgggtattagtaccaatttctcacacgggttggagtattattag

SEQ ID NO: 868 - DNA, 62 bp, synthetic construct
  source 1..62: mol_type = other DNA
ggaatttagtgagaagggaggcactcgaatgccacatgattactgggtgttggaatttagtg

SEQ ID NO: 869 - DNA, 62 bp, synthetic construct
  source 1..62: mol_type = other DNA
ggaatttagtgagaagggtgacctcaagttacacagtttcctctgggtgttggaatttagtg

SEQ ID NO: 870 - DNA, 61 bp, synthetic construct
  source 1..61: mol_type = other DNA
ggaatttagtgagaagggaggcactcgaatgccacatgataacgggtgttggaatttagtg

SEQ ID NO: 871 - DNA, 62 bp, synthetic construct
  source 1..62: mol_type = other DNA
ggaatttagtgagaagggtggaccgccactcgaatgccacaactgggtgttggaatttagtg

SEQ ID NO: 872 - DNA, 61 bp, synthetic construct
  source 1..61: mol_type = other DNA
ggaatttagtgagaagggtgagctgcactcaagttacacacaagggtgttggaatttagtg

SEQ ID NO: 873 - DNA, 60 bp, synthetic construct
  source 1..60: mol_type = other DNA
ggaatttagtgagaagggaggcactcgaatgccacatgaaaagggtgttggaatttagtg

SEQ ID NO: 874 - DNA, 61 bp, synthetic construct
  source 1..61: mol_type = other DNA
ggaatttagtgagaagggtggaccgccactcgaatgccactacgggtgttggaatttagtg

SEQ ID NO: 875 - DNA, 61 bp, synthetic construct
  source 1..61: mol_type = other DNA
ggaatttagtgagaagggtggccgccactcgaatgccacaactgggtgttggaatttagtg

SEQ ID NO: 876 - DNA, 62 bp, synthetic construct
  source 1..62: mol_type = other DNA
aatgatatgttgagtgggaggcactcgaatgccacatgattactgtggtggaatgatatgtt

SEQ ID NO: 877 - DNA, 62 bp, synthetic construct
  source 1..62: mol_type = other DNA
aatgatatgttgagtgggtgacctcaagttacacagtttcctctgtggtggaatgatatgtt

SEQ ID NO: 878 - DNA, 61 bp, synthetic construct
  source 1..61: mol_type = other DNA
aatgatatgttgagtgggaggcactcgaatgccacatgataacgtggtggaatgatatgtt

SEQ ID NO: 879 - DNA, 62 bp, synthetic construct
  source 1..62: mol_type = other DNA
aatgatatgttgagtgggtggaccgccactcgaatgccacaactgtggtggaatgatatgtt

SEQ ID NO: 880 - DNA, 61 bp, synthetic construct
  source 1..61: mol_type = other DNA
aatgatatgttgagtgggtgagctgcactcaagttacacacaagtggtggaatgatatgtt

SEQ ID NO: 881 - DNA, 60 bp, synthetic construct
  source 1..60: mol_type = other DNA
aatgatatgttgagtgggaggcactcgaatgccacatgaaaagtggtggaatgatatgtt

SEQ ID NO: 882 - DNA, 61 bp, synthetic construct
  source 1..61: mol_type = other DNA
aatgatatgttgagtgggtggaccgccactcgaatgccactacgtggtggaatgatatgtt

SEQ ID NO: 883 - DNA, 61 bp, synthetic construct
  source 1..61: mol_type = other DNA
aatgatatgttgagtgggtggccgccactcgaatgccacaactgtggtggaatgatatgtt

SEQ ID NO: 884 - DNA, 61 bp, synthetic construct
  source 1..61: mol_type = other DNA
ataagatagtgagatgggagagacactctagcaaaacagtaaggtgggtgataagatagtg

SEQ ID NO: 885 - DNA, 60 bp, synthetic construct
  source 1..60: mol_type = other DNA
ataagatagtgagatgggtggagtttttcacacactgcctacgtgggtgataagatagtg

SEQ ID NO: 886 - DNA, 61 bp, synthetic construct
  source 1..61: mol_type = other DNA
ataagatagtgagatgggccgcgttaccggcccgccagggcctgtgggtgataagatagtg

SEQ ID NO: 887 - DNA, 62 bp, synthetic construct
  source 1..62: mol_type = other DNA
ataagatagtgagatgggtagaaaacttcatcttaatcgctagcgtgggtgataagatagtg

SEQ ID NO: 888 - DNA, 61 bp, synthetic construct
  source 1..61: mol_type = other DNA
ataagatagtgagatgggtgagacactctagcaaaacagtaaggtgggtgataagatagtg

SEQ ID NO: 889 - DNA, 62 bp, synthetic construct
  source 1..62: mol_type = other DNA
ataagatagtgagatgggaggaaacttcatcttaatcgcttgcagtgggtgataagatagtg

SEQ ID NO: 890 - DNA, 60 bp, synthetic construct
  source 1..60: mol_type = other DNA
ataagatagtgagatgggcgggttaccggcccgccagggcctgtgggtgataagatagtg

SEQ ID NO: 891 - DNA, 61 bp, synthetic construct
  source 1..61: mol_type = other DNA
ataagatagtgagatgggtgcctttttcacacactgccatcgcgtgggtgataagatagtg

SEQ ID NO: 892 - DNA, 61 bp, synthetic construct
  source 1..61: mol_type = other DNA
aatgatatgttgagtgggagagacactctagcaaaacagtaaggtggtggaatgatatgtt

SEQ ID NO: 893 - DNA, 60 bp, synthetic construct
  source 1..60: mol_type = other DNA
aatgatatgttgagtgggtggagtttttcacacactgcctacgtggtggaatgatatgtt

SEQ ID NO: 894 - DNA, 61 bp, synthetic construct
  source 1..61: mol_type = other DNA
aatgatatgttgagtgggccgcgttaccggcccgccagggcctgtggtggaatgatatgtt

SEQ ID NO: 895 - DNA, 62 bp, synthetic construct
  source 1..62: mol_type = other DNA
aatgatatgttgagtgggtagaaaacttcatcttaatcgctagcgtggtggaatgatatgtt

SEQ ID NO: 896 - DNA, 61 bp, synthetic construct
  source 1..61: mol_type = other DNA
aatgatatgttgagtgggtgagacactctagcaaaacagtaaggtggtggaatgatatgtt

SEQ ID NO: 897 - DNA, 62 bp, synthetic construct
  source 1..62: mol_type = other DNA
aatgatatgttgagtgggaggaaacttcatcttaatcgcttgcagtggtggaatgatatgtt

SEQ ID NO: 898 - DNA, 60 bp, synthetic construct
  source 1..60: mol_type = other DNA
aatgatatgttgagtgggcgggttaccggcccgccagggcctgtggtggaatgatatgtt

SEQ ID NO: 899 - DNA, 61 bp, synthetic construct
  source 1..61: mol_type = other DNA
aatgatatgttgagtgggtgcctttttcacacactgccatcgcgtggtggaatgatatgtt

SEQ ID NO: 900 - DNA, 63 bp, synthetic construct
  source 1..63: mol_type = other DNA
ggtaattgagtagaagggagtcggtacctgcaaacatccacagcagggatgaggtaattgagt

SEQ ID NO: 901 - DNA, 61 bp, synthetic construct
  source 1..61: mol_type = other DNA
ggtaattgagtagaagggtggacccgaaagataggccatggacgggatgaggtaattgagt

SEQ ID NO: 902 - DNA, 60 bp, synthetic construct
  source 1..60: mol_type = other DNA
ggtaattgagtagaagggcgagccgccgactgtatatcgggcgggatgaggtaattgagt

SEQ ID NO: 903 - DNA, 63 bp, synthetic construct
  source 1..63: mol_type = other DNA
ggtaattgagtagaagggtgacgatgactttaaggattggacgctgggatgaggtaattgagt

SEQ ID NO: 904 - DNA, 60 bp, synthetic construct
  source 1..60: mol_type = other DNA
ggtaattgagtagaagggatcccaatcaccggtttcaccgatgggatgaggtaattgagt

SEQ ID NO: 905 - DNA, 61 bp, synthetic construct
  source 1..61: mol_type = other DNA
ggtaattgagtagaagggaacccacaaaatttcacggcagcgtgggatgaggtaattgagt

SEQ ID NO: 906 - DNA, 62 bp, synthetic construct
  source 1..62: mol_type = other DNA
ggtaattgagtagaagggaatgataaatctttgctccgacagtcgggatgaggtaattgagt

SEQ ID NO: 907 - DNA, 60 bp, synthetic construct
  source 1..60: mol_type = other DNA
ggtaattgagtagaagggtggctctggatctttcctctggttgggatgaggtaattgagt

SEQ ID NO: 908 - DNA, 63 bp, synthetic construct
  source 1..63: mol_type = other DNA
aatgatatgttgagtgggagtcggtacctgcaaacatccacagcagtggtggaatgatatgtt

SEQ ID NO: 909 - DNA, 61 bp, synthetic construct
  source 1..61: mol_type = other DNA
aatgatatgttgagtgggtggacccgaaagataggccatggacgtggtggaatgatatgtt

SEQ ID NO: 910 - DNA, 60 bp, synthetic construct
  source 1..60: mol_type = other DNA
aatgatatgttgagtgggcgagccgccgactgtatatcgggcgtggtggaatgatatgtt

SEQ ID NO: 911 - DNA, 63 bp, synthetic construct
  source 1..63: mol_type = other DNA
aatgatatgttgagtgggtgacgatgactttaaggattggacgctgtggtggaatgatatgtt

SEQ ID NO: 912 - DNA, 60 bp, synthetic construct
  source 1..60: mol_type = other DNA
aatgatatgttgagtgggatcccaatcaccggtttcaccgatgtggtggaatgatatgtt

SEQ ID NO: 913 - DNA, 60 bp, synthetic construct
  source 1..60: mol_type = other DNA
aatgatatgttgagtgggaacccacaaaatttcacggcagcggtggtggaatgatatgtt

SEQ ID NO: 914 - DNA, 62 bp, synthetic construct
  source 1..62: mol_type = other DNA
aatgatatgttgagtgggaatgataaatctttgctccgacagtcgtggtggaatgatatgtt

SEQ ID NO: 915 - DNA, 60 bp, synthetic construct
  source 1..60: mol_type = other DNA
aatgatatgttgagtgggtggctctggatctttcctctggttgtggtggaatgatatgtt

SEQ ID NO: 916 - DNA, 65 bp, synthetic construct
  source 1..65: mol_type = other DNA
gtaatagatatgagggtgagttggtacatacaaaatggtatacaatgtgggagggtaatagatat

SEQ ID NO: 917 - DNA, 65 bp, synthetic construct
  source 1..65: mol_type = other DNA
gtaatagatatgagggtgatgaatggtatacataccaaactttaaagtgggagggtaatagatat

SEQ ID NO: 918 - DNA, 65 bp, synthetic construct
  source 1..65: mol_type = other DNA
gtaatagatatgagggtgtgtatggtatacataccaaactttataggtgggagggtaatagatat

SEQ ID NO: 919 - DNA, 64 bp, synthetic construct
  source 1..64: mol_type = other DNA
gtaatagatatgagggtggtaggtacatacaaaatggtatacaatgtgggagggtaatagatat

SEQ ID NO: 920 - DNA, 64 bp, synthetic construct
  source 1..64: mol_type = other DNA
gtaatagatatgagggtgagttggtacatacaaaatggtatactattgggagggtaatagatat

SEQ ID NO: 921 - DNA, 65 bp, synthetic construct
  source 1..65: mol_type = other DNA
gtaatagatatgagggtggtttggtatacataccaaactttattaggtgggagggtaatagatat

SEQ ID NO: 922 - DNA, 65 bp, synthetic construct
  source 1..65: mol_type = other DNA
gtaatagatatgagggtgccaacataccaaactttattcccataatttgggagggtaatagatat

SEQ ID NO: 923 - DNA, 66 bp, synthetic construct
  source 1..66: mol_type = other DNA
tgtataggattagaagggagttggtacatacaaaatggtatacaatgtgggtgagtgtataggatt

SEQ ID NO: 924 - DNA, 66 bp, synthetic construct
  source 1..66: mol_type = other DNA
tgtataggattagaagggatgaatggtatacataccaaactttaaagtgggtgagtgtataggatt

SEQ ID NO: 925 - DNA, 66 bp, synthetic construct
  source 1..66: mol_type = other DNA
tgtataggattagaagggtgtatggtatacataccaaactttataggtgggtgagtgtataggatt

SEQ ID NO: 926 - DNA, 66 bp, synthetic construct
  source 1..66: mol_type = other DNA
tgtataggattagaagggtgtaggtacatacaaaatggtatacaatgtgggtgagtgtataggatt

SEQ ID NO: 927 - DNA, 64 bp, synthetic construct
  source 1..64: mol_type = other DNA
tgtataggattagaagggagttggtacatacaaaatggtatactatgggtgagtgtataggatt

SEQ ID NO: 928 - DNA, 67 bp, synthetic construct
  source 1..67: mol_type = other DNA
tgtataggattagaagggtgtttggtatacataccaaactttattaggtgggtgagtgtataggatt

SEQ ID NO: 929 - DNA, 65 bp, synthetic construct
  source 1..65: mol_type = other DNA
tgtataggattagaagggccaacataccaaactttattcccataattgggtgagtgtataggatt

SEQ ID NO: 930 - DNA, 61 bp, synthetic construct
  source 1..61: mol_type = other DNA
ataagatagtgagatgggtgcgtctccactattgctagcgcttgtgggtgataagatagtg

SEQ ID NO: 931 - DNA, 64 bp, synthetic construct
  source 1..64: mol_type = other DNA
ataagatagtgagatgggtggactcaactgtactcaaggacgcgtcgtgggtgataagatagtg

SEQ ID NO: 932 - DNA, 60 bp, synthetic construct
  source 1..60: mol_type = other DNA
ataagatagtgagatgggcagttgcagtttagtgagctgggagtgggtgataagatagtg

SEQ ID NO: 933 - DNA, 61 bp, synthetic construct
  source 1..61: mol_type = other DNA
ataagatagtgagatgggtggaatccatcgaagactaggtcccgtgggtgataagatagtg

SEQ ID NO: 934 - DNA, 66 bp, synthetic construct
  source 1..66: mol_type = other DNA
ataagatagtgagatgggtggattcataaagtacatacaaaaagggtggtgggtgataagatagtg

SEQ ID NO: 935 - DNA, 61 bp, synthetic construct
  source 1..61: mol_type = other DNA
ataagatagtgagatgggagcatctccactattgctagcgcttgtgggtgataagatagtg

SEQ ID NO: 936 - DNA, 60 bp, synthetic construct
  source 1..60: mol_type = other DNA
ataagatagtgagatgggtggcacagcggtgattgctcagacgtgggtgataagatagtg

SEQ ID NO: 937 - DNA, 60 bp, synthetic construct
  source 1..60: mol_type = other DNA
ataagatagtgagatgggaccattggcatccacttgcgtccagtgggtgataagatagtg

SEQ ID NO: 938 - DNA, 61 bp, synthetic construct
  source 1..61: mol_type = other DNA
tgtataggattagaagggtgcgtctccactattgctagcgcttgggtgagtgtataggatt

SEQ ID NO: 939 - DNA, 64 bp, synthetic construct
  source 1..64: mol_type = other DNA
tgtataggattagaagggtggactcaactgtactcaaggacgcgtcgggtgagtgtataggatt

SEQ ID NO: 940 - DNA, 60 bp, synthetic construct
  source 1..60: mol_type = other DNA
tgtataggattagaagggcagttgcagtttagtgagctgggagggtgagtgtataggatt

SEQ ID NO: 941 - DNA, 61 bp, synthetic construct
  source 1..61: mol_type = other DNA
tgtataggattagaagggtggaatccatcgaagactaggtcccgggtgagtgtataggatt

SEQ ID NO: 942 - DNA, 67 bp, synthetic construct
  source 1..67: mol_type = other DNA
tgtataggattagaagggtggattcataaagtacatacaaaaagggtgtgggtgagtgtataggatt

SEQ ID NO: 943 - DNA, 61 bp, synthetic construct
  source 1..61: mol_type = other DNA
tgtataggattagaagggagcatctccactattgctagcgcttgggtgagtgtataggatt

SEQ ID NO: 944 - DNA, 60 bp, synthetic construct
  source 1..60: mol_type = other DNA
tgtataggattagaagggtggcacagcggtgattgctcagacgggtgagtgtataggatt

SEQ ID NO: 945 - DNA, 60 bp, synthetic construct
  source 1..60: mol_type = other DNA
tgtataggattagaagggaccattggcatccacttgcgtccagggtgagtgtataggatt

SEQ ID NO: 946 - DNA, 63 bp, synthetic construct
  source 1..63: mol_type = other DNA
ttaatatgggtagttgggtgtgtcacttggacgaatcctcgtagtgggtgtgttaatatgggt

SEQ ID NO: 947 - DNA, 61 bp, synthetic construct
  source 1..61: mol_type = other DNA
ttaatatgggtagttgggacgcccagctgtatcatgcggttaagggtgtgttaatatgggt

SEQ ID NO: 948 - DNA, 60 bp, synthetic construct
  source 1..60: mol_type = other DNA
ttaatatgggtagttgggcgctttgcctctctttgttggagcgggtgtgttaatatgggt

SEQ ID NO: 949 - DNA, 62 bp, synthetic construct
  source 1..62: mol_type = other DNA
ttaatatgggtagttgggacgcccagctgtatcatgcggtaaatgggtgtgttaatatgggt

SEQ ID NO: 950 - DNA, 60 bp, synthetic construct
  source 1..60: mol_type = other DNA
ttaatatgggtagttgggagttggacgaatcctcgatccttagggtgtgttaatatgggt

SEQ ID NO: 951 - DNA, 62 bp, synthetic construct
  source 1..62: mol_type = other DNA
ttaatatgggtagttgggtggacttcacttggacgaatcctgctgggtgtgttaatatgggt

SEQ ID NO: 952 - DNA, 60 bp, synthetic construct
  source 1..60: mol_type = other DNA
ttaatatgggtagttgggacgcccagctgtatcatgcggatagggtgtgttaatatgggt

SEQ ID NO: 953 - DNA, 62 bp, synthetic construct
  source 1..62: mol_type = other DNA
ttaatatgggtagttgggtgcactttgcctctctttgttggagcgggtgtgttaatatgggt

SEQ ID NO: 954 - DNA, 63 bp, synthetic construct
  source 1..63: mol_type = other DNA
tgtataggattagaagggtgtgtcacttggacgaatcctcgtagtgggtgagtgtataggatt

SEQ ID NO: 955 - DNA, 61 bp, synthetic construct
  source 1..61: mol_type = other DNA
tgtataggattagaagggacgcccagctgtatcatgcggttaagggtgagtgtataggatt

SEQ ID NO: 956 - DNA, 60 bp, synthetic construct
  source 1..60: mol_type = other DNA
tgtataggattagaagggcgctttgcctctctttgttggagcgggtgagtgtataggatt

SEQ ID NO: 957 - DNA, 62 bp, synthetic construct
  source 1..62: mol_type = other DNA
tgtataggattagaagggacgcccagctgtatcatgcggtaaatgggtgagtgtataggatt

SEQ ID NO: 958 - DNA, 60 bp, synthetic construct
  source 1..60: mol_type = other DNA
tgtataggattagaagggagttggacgaatcctcgatccttagggtgagtgtataggatt

SEQ ID NO: 959 - DNA, 62 bp, synthetic construct
  source 1..62: mol_type = other DNA
tgtataggattagaagggtggacttcacttggacgaatcctgctgggtgagtgtataggatt

SEQ ID NO: 960 - DNA, 60 bp, synthetic construct
  source 1..60: mol_type = other DNA
tgtataggattagaagggacgcccagctgtatcatgcggatagggtgagtgtataggatt

SEQ ID NO: 961 - DNA, 62 bp, synthetic construct
  source 1..62: mol_type = other DNA
tgtataggattagaagggtgcactttgcctctctttgttggagcgggtgagtgtataggatt

SEQ ID NO: 962 - DNA, 63 bp, synthetic construct
  source 1..63: mol_type = other DNA
ggtaattgagtagaagggtcgtgactttctaagtaattaccgagtgggatgaggtaattgagt

SEQ ID NO: 963 - DNA, 61 bp, synthetic construct
  source 1..61: mol_type = other DNA
ggtaattgagtagaagggtgtttctgatgcaattctccggaacgggatgaggtaattgagt

SEQ ID NO: 964 - DNA, 61 bp, synthetic construct
  source 1..61: mol_type = other DNA
ggtaattgagtagaagggcttgctttaagagatccgcttcggtgggatgaggtaattgagt

SEQ ID NO: 965 - DNA, 61 bp, synthetic construct
  source 1..61: mol_type = other DNA
ggtaattgagtagaagggtcttgcgtctagtgttgttatcgccgggatgaggtaattgagt

SEQ ID NO: 966 - DNA, 63 bp, synthetic construct
  source 1..63: mol_type = other DNA
ggtaattgagtagaagggcttatctttcaaactctagacatggcagggatgaggtaattgagt

SEQ ID NO: 967 - DNA, 62 bp, synthetic construct
  source 1..62: mol_type = other DNA
ggtaattgagtagaagggtctgctgactcctataaaggtttagtgggatgaggtaattgagt

SEQ ID NO: 968 - DNA, 61 bp, synthetic construct
  source 1..61: mol_type = other DNA
ggtaattgagtagaagggtggatctcttaggtttgcactgctagggatgaggtaattgagt

SEQ ID NO: 969 - DNA, 60 bp, synthetic construct
  source 1..60: mol_type = other DNA
ggtaattgagtagaagggtccgaaacctcccaacacttacgtgggatgaggtaattgagt

SEQ ID NO: 970 - DNA, 63 bp, synthetic construct
  source 1..63: mol_type = other DNA
tgtataggattagaagggtcgtgactttctaagtaattaccgagtgggtgagtgtataggatt

SEQ ID NO: 971 - DNA, 61 bp, synthetic construct
  source 1..61: mol_type = other DNA
tgtataggattagaagggtgtttctgatgcaattctccggaacgggtgagtgtataggatt

SEQ ID NO: 972 - DNA, 61 bp, synthetic construct
  source 1..61: mol_type = other DNA
tgtataggattagaagggcttgctttaagagatccgcttcggtgggtgagtgtataggatt

SEQ ID NO: 973 - DNA, 61 bp, synthetic construct
  source 1..61: mol_type = other DNA
tgtataggattagaagggtcttgcgtctagtgttgttatcgccgggtgagtgtataggatt

SEQ ID NO: 974 - DNA, 63 bp, synthetic construct
  source 1..63: mol_type = other DNA
tgtataggattagaagggcttatctttcaaactctagacatggcagggtgagtgtataggatt

SEQ ID NO: 975 - DNA, 62 bp, synthetic construct
  source 1..62: mol_type = other DNA
tgtataggattagaagggtctgctgactcctataaaggtttagtgggtgagtgtataggatt

SEQ ID NO: 976 - DNA, 61 bp, synthetic construct
  source 1..61: mol_type = other DNA
tgtataggattagaagggtggatctcttaggtttgcactgctagggtgagtgtataggatt

SEQ ID NO: 977 - DNA, 60 bp, synthetic construct
  source 1..60: mol_type = other DNA
tgtataggattagaagggtccgaaacctcccaacacttacgtgggtgagtgtataggatt

SEQ ID NO: 978 - DNA, 62 bp, synthetic construct
  source 1..62: mol_type = other DNA
gtaatagatatgagggtggccacccttgggtccccgacaccatctgggagggtaatagatat

SEQ ID NO: 979 - DNA, 60 bp, synthetic construct
  source 1..60: mol_type = other DNA
gtaatagatatgagggtgctcccttgggtccccgacaccatctgggagggtaatagatat

SEQ ID NO: 980 - DNA, 60 bp, synthetic construct
  source 1..60: mol_type = other DNA
gtaatagatatgagggtgcctcccttgggtccccgacacgattgggagggtaatagatat

SEQ ID NO: 981 - DNA, 61 bp, synthetic construct
  source 1..61: mol_type = other DNA
gtaatagatatgagggtgcctcccttgggtccccgacaccatctgggagggtaatagatat

SEQ ID NO: 982 - DNA, 61 bp, synthetic construct
  source 1..61: mol_type = other DNA
gtaatagatatgagggtggccacccttgggtccccgacacgattgggagggtaatagatat

SEQ ID NO: 983 - DNA, 60 bp, synthetic construct
  source 1..60: mol_type = other DNA
gtaatagatatgagggtgaaagggtttgcttaccgtcacgcctgggagggtaatagatat

SEQ ID NO: 984 - DNA, 60 bp, synthetic construct
  source 1..60: mol_type = other DNA
gtaatagatatgagggtggccacccttgggtccccgacaggatgggagggtaatagatat

SEQ ID NO: 985 - DNA, 63 bp, synthetic construct
  source 1..63: mol_type = other DNA
atggaagtagtagaagggtgccacccttgggtccccgacaccatcgggatgtatggaagtagt

SEQ ID NO: 986 - DNA, 60 bp, synthetic construct
  source 1..60: mol_type = other DNA
atggaagtagtagaagggctcccttgggtccccgacaccatcgggatgtatggaagtagt

SEQ ID NO: 987 - DNA, 60 bp, synthetic construct
  source 1..60: mol_type = other DNA
atggaagtagtagaagggcctcccttgggtccccgacacgatgggatgtatggaagtagt

SEQ ID NO: 988 - DNA, 61 bp, synthetic construct
  source 1..61: mol_type = other DNA
atggaagtagtagaagggcctcccttgggtccccgacaccatcgggatgtatggaagtagt

SEQ ID NO: 989 - DNA, 62 bp, synthetic construct
  source 1..62: mol_type = other DNA
atggaagtagtagaagggtgccacccttgggtccccgacacgatgggatgtatggaagtagt

SEQ ID NO: 990 - DNA, 60 bp, synthetic construct
  source 1..60: mol_type = other DNA
atggaagtagtagaagggaaagggtttgcttaccgtcacgccgggatgtatggaagtagt

SEQ ID NO: 991 - DNA, 61 bp, synthetic construct
  source 1..61: mol_type = other DNA
atggaagtagtagaagggtgccacccttgggtccccgacaggagggatgtatggaagtagt

SEQ ID NO: 992 - DNA, 60 bp, synthetic construct
  source 1..60: mol_type = other DNA
ggaatttagtgagaagggagttcagacctaagcaaccgcgacgggtgttggaatttagtg

SEQ ID NO: 993 - DNA, 62 bp, synthetic construct
  source 1..62: mol_type = other DNA
ggaatttagtgagaagggatcgtgactttctggttggatacgcagggtgttggaatttagtg

SEQ ID NO: 994 - DNA, 60 bp, synthetic construct
  source 1..60: mol_type = other DNA
ggaatttagtgagaagggtcgcagttgcagaccagacagggcgggtgttggaatttagtg

SEQ ID NO: 995 - DNA, 62 bp, synthetic construct
  source 1..62: mol_type = other DNA
ggaatttagtgagaagggtggacataaaggttaggccaccctgtgggtgttggaatttagtg

SEQ ID NO: 996 - DNA, 61 bp, synthetic construct
  source 1..61: mol_type = other DNA
ggaatttagtgagaagggcttgaacgccttatctctaaggaatgggtgttggaatttagtg

SEQ ID NO: 997 - DNA, 60 bp, synthetic construct
  source 1..60: mol_type = other DNA
ggaatttagtgagaagggtcaggccagtgcgtacgacttcgtgggtgttggaatttagtg

SEQ ID NO: 998 - DNA, 60 bp, synthetic construct
  source 1..60: mol_type = other DNA
ggaatttagtgagaagggttatggcaactagtaacaaggcaagggtgttggaatttagtg

SEQ ID NO: 999 - DNA, 63 bp, synthetic construct
  source 1..63: mol_type = other DNA
ggaatttagtgagaagggttcatctttcaaacaaaagccatgaccgggtgttggaatttagtg

SEQ ID NO: 1000 - DNA, 60 bp, synthetic construct
  source 1..60: mol_type = other DNA
atggaagtagtagaagggagttcagacctaagcaaccgcgacgggatgtatggaagtagt

SEQ ID NO: 1001 - DNA, 62 bp, synthetic construct
  source 1..62: mol_type = other DNA
atggaagtagtagaagggatcgtgactttctggttggatacgcagggatgtatggaagtagt

SEQ ID NO: 1002 - DNA, 60 bp, synthetic construct
  source 1..60: mol_type = other DNA
atggaagtagtagaagggtcgcagttgcagaccagacagggcgggatgtatggaagtagt

SEQ ID NO: 1003 - DNA, 62 bp, synthetic construct
  source 1..62: mol_type = other DNA
atggaagtagtagaagggtggacataaaggttaggccaccctgtgggatgtatggaagtagt

SEQ ID NO: 1004 - DNA, 61 bp, synthetic construct
  source 1..61: mol_type = other DNA
atggaagtagtagaagggcttgaacgccttatctctaaggaatgggatgtatggaagtagt

SEQ ID NO: 1005 - DNA, 60 bp, synthetic construct
  source 1..60: mol_type = other DNA
atggaagtagtagaagggtcaggccagtgcgtacgacttcgtgggatgtatggaagtagt

SEQ ID NO: 1006 - DNA, 60 bp, synthetic construct
  source 1..60: mol_type = other DNA
atggaagtagtagaagggttatggcaactagtaacaaggcaagggatgtatggaagtagt

SEQ ID NO: 1007 - DNA, 63 bp, synthetic construct
  source 1..63: mol_type = other DNA
atggaagtagtagaagggttcatctttcaaacaaaagccatgaccgggatgtatggaagtagt

SEQ ID NO: 1008 - DNA, 60 bp, synthetic construct
  source 1..60: mol_type = other DNA
ttaatatgggtagttgggtaattcctttcccagcaagctccagggtgtgttaatatgggt

SEQ ID NO: 1009 - DNA, 61 bp, synthetic construct
  source 1..61: mol_type = other DNA
ttaatatgggtagttgggtgaaccagcaagctggtccattgtagggtgtgttaatatgggt

SEQ ID NO: 1010 - DNA, 61 bp, synthetic construct
  source 1..61: mol_type = other DNA
ttaatatgggtagttgggtgttcttggtaaggttctccgccaagggtgtgttaatatgggt

SEQ ID NO: 1011 - DNA, 61 bp, synthetic construct
  source 1..61: mol_type = other DNA
ttaatatgggtagttgggtgccccatcccatagcgataaaagagggtgtgttaatatgggt

SEQ ID NO: 1012 - DNA, 60 bp, synthetic construct
  source 1..60: mol_type = other DNA
ttaatatgggtagttgggaagatctgacttgccctgccaggagggtgtgttaatatgggt

SEQ ID NO: 1013 - DNA, 62 bp, synthetic construct
  source 1..62: mol_type = other DNA
ttaatatgggtagttgggtgctggactccccggctaagggcggtgggtgtgttaatatgggt

SEQ ID NO: 1014 - DNA, 62 bp, synthetic construct
  source 1..62: mol_type = other DNA
ttaatatgggtagttgggtggaggattatctccggcagtcaggtgggtgtgttaatatgggt

SEQ ID NO: 1015 - DNA, 60 bp, synthetic construct
  source 1..60: mol_type = other DNA
ttaatatgggtagttgggtagaactgggacggtttttttcacgggtgtgttaatatgggt

SEQ ID NO: 1016 - DNA, 60 bp, synthetic construct
  source 1..60: mol_type = other DNA
atggaagtagtagaagggtaattcctttcccagcaagctccagggatgtatggaagtagt

SEQ ID NO: 1017 - DNA, 61 bp, synthetic construct
  source 1..61: mol_type = other DNA
atggaagtagtagaagggtgaaccagcaagctggtccattgtagggatgtatggaagtagt

SEQ ID NO: 1018 - DNA, 61 bp, synthetic construct
  source 1..61: mol_type = other DNA
atggaagtagtagaagggtgttcttggtaaggttctccgccaagggatgtatggaagtagt

SEQ ID NO: 1019 - DNA, 61 bp, synthetic construct
  source 1..61: mol_type = other DNA
atggaagtagtagaagggtgccccatcccatagcgataaaagagggatgtatggaagtagt

SEQ ID NO: 1020 - DNA, 60 bp, synthetic construct
  source 1..60: mol_type = other DNA
atggaagtagtagaagggaagatctgacttgccctgccaggagggatgtatggaagtagt

SEQ ID NO: 1021 - DNA, 62 bp, synthetic construct
  source 1..62: mol_type = other DNA
atggaagtagtagaagggtgctggactccccggctaagggcggtgggatgtatggaagtagt

SEQ ID NO: 1022 - DNA, 62 bp, synthetic construct
  source 1..62: mol_type = other DNA
atggaagtagtagaagggtggaggattatctccggcagtcaggtgggatgtatggaagtagt

SEQ ID NO: 1023 - DNA, 60 bp, synthetic construct
  source 1..60: mol_type = other DNA
atggaagtagtagaagggtagaactgggacggtttttttcacgggatgtatggaagtagt

SEQ ID NO: 1024 - DNA, 61 bp, synthetic construct
  source 1..61: mol_type = other DNA
ggtaattgagtagaagggaaacatcagacttaaaagaccgggagggatgaggtaattgagt

SEQ ID NO: 1025 - DNA, 61 bp, synthetic construct
  source 1..61: mol_type = other DNA
ggtaattgagtagaagggtgactccaaaaggttaccccacgccgggatgaggtaattgagt

SEQ ID NO: 1026 - DNA, 63 bp, synthetic construct
  source 1..63: mol_type = other DNA
ggtaattgagtagaagggccgtaagagatttgctaaacctcggccgggatgaggtaattgagt

SEQ ID NO: 1027 - DNA, 62 bp, synthetic construct
  source 1..62: mol_type = other DNA
ggtaattgagtagaagggtgttactcggtgataaagaagttagcgggatgaggtaattgagt

SEQ ID NO: 1028 - DNA, 65 bp, synthetic construct
  source 1..65: mol_type = other DNA
ggtaattgagtagaagggtggactctaggattgtcaaaagatgtgttgggatgaggtaattgagt

SEQ ID NO: 1029 - DNA, 60 bp, synthetic construct
  source 1..60: mol_type = other DNA
ggtaattgagtagaagggttgtccaacacttagcattcaagcgggatgaggtaattgagt

SEQ ID NO: 1030 - DNA, 60 bp, synthetic construct
  source 1..60: mol_type = other DNA
ggtaattgagtagaagggcgccccatccaaaagcggtaggtagggatgaggtaattgagt

SEQ ID NO: 1031 - DNA, 65 bp, synthetic construct
  source 1..65: mol_type = other DNA
ggtaattgagtagaagggaccagataccgtcgaaacgtgaacagaatgggatgaggtaattgagt

SEQ ID NO: 1032 - DNA, 61 bp, synthetic construct
  source 1..61: mol_type = other DNA
atggaagtagtagaagggaaacatcagacttaaaagaccgggagggatgtatggaagtagt

SEQ ID NO: 1033 - DNA, 61 bp, synthetic construct
  source 1..61: mol_type = other DNA
atggaagtagtagaagggtgactccaaaaggttaccccacgccgggatgtatggaagtagt

SEQ ID NO: 1034 - DNA, 63 bp, synthetic construct
  source 1..63: mol_type = other DNA
atggaagtagtagaagggccgtaagagatttgctaaacctcggccgggatgtatggaagtagt

SEQ ID NO: 1035 - DNA, 62 bp, synthetic construct
  source 1..62: mol_type = other DNA
atggaagtagtagaagggtgttactcggtgataaagaagttagcgggatgtatggaagtagt

SEQ ID NO: 1036 - DNA, 65 bp, synthetic construct
  source 1..65: mol_type = other DNA
atggaagtagtagaagggtggactctaggattgtcaaaagatgtgttgggatgtatggaagtagt

SEQ ID NO: 1037 - DNA, 60 bp, synthetic construct
  source 1..60: mol_type = other DNA
atggaagtagtagaagggttgtccaacacttagcattcaagcgggatgtatggaagtagt

SEQ ID NO: 1038 - DNA, 60 bp, synthetic construct
  source 1..60: mol_type = other DNA
atggaagtagtagaagggcgccccatccaaaagcggtaggtagggatgtatggaagtagt

SEQ ID NO: 1039 - DNA, 65 bp, synthetic construct
  source 1..65: mol_type = other DNA
atggaagtagtagaagggaccagataccgtcgaaacgtgaacagaatgggatgtatggaagtagt

SEQ ID NO: 1040 - DNA, 60 bp, synthetic construct
  source 1..60: mol_type = other DNA
gtaatagatatgagggtggtggtctatatgtcccgaaggttctgggagggtaatagatat

SEQ ID NO: 1041 - DNA, 60 bp, synthetic construct
  source 1..60: mol_type = other DNA
gtaatagatatgagggtggatttaatattggcaaccggagtatgggagggtaatagatat

SEQ ID NO: 1042 - DNA, 60 bp, synthetic construct
  source 1..60: mol_type = other DNA
gtaatagatatgagggtggcttaccgtcattcttcatccgagtgggagggtaatagatat

SEQ ID NO: 1043 - DNA, 60 bp, synthetic construct
  source 1..60: mol_type = other DNA
gtaatagatatgagggtggattgttatcccgatgacagaccgtgggagggtaatagatat

SEQ ID NO: 1044 - DNA, 61 bp, synthetic construct
  source 1..61: mol_type = other DNA
gtaatagatatgagggtggaccagtaacctttttaccccatactgggagggtaatagatat

SEQ ID NO: 1045 - DNA, 60 bp, synthetic construct
  source 1..60: mol_type = other DNA
gtaatagatatgagggtgcaatacccccttcgtctagtaaggtgggagggtaatagatat

SEQ ID NO: 1046 - DNA, 60 bp, synthetic construct
  source 1..60: mol_type = other DNA
gtaatagatatgagggtgggtcatcggttttaccttcgggcctgggagggtaatagatat

SEQ ID NO: 1047 - DNA, 62 bp, synthetic construct
  source 1..62: mol_type = other DNA
gtaatagatatgagggtgcgaccagttttatgtgcaattcccgctgggagggtaatagatat

SEQ ID NO: 1048 - DNA, 61 bp, synthetic construct
  source 1..61: mol_type = other DNA
ggatagagtatagttgggtgtggtctatatgtcccgaaggttcggatggaggatagagtat

SEQ ID NO: 1049 - DNA, 61 bp, synthetic construct
  source 1..61: mol_type = other DNA
ggatagagtatagttgggtgatttaatattggcaaccggagtaggatggaggatagagtat

SEQ ID NO: 1050 - DNA, 61 bp, synthetic construct
  source 1..61: mol_type = other DNA
ggatagagtatagttgggtgcttaccgtcattcttcatccgagggatggaggatagagtat

SEQ ID NO: 1051 - DNA, 61 bp, synthetic construct
  source 1..61: mol_type = other DNA
ggatagagtatagttgggtgattgttatcccgatgacagaccgggatggaggatagagtat

SEQ ID NO: 1052 - DNA, 62 bp, synthetic construct
  source 1..62: mol_type = other DNA
ggatagagtatagttgggtgaccagtaacctttttaccccatacggatggaggatagagtat

SEQ ID NO: 1053 - DNA, 61 bp, synthetic construct
  source 1..61: mol_type = other DNA
ggatagagtatagttgggcaatacccccttcgtctagtaaggtggatggaggatagagtat

SEQ ID NO: 1054 - DNA, 61 bp, synthetic construct
  source 1..61: mol_type = other DNA
ggatagagtatagttgggtggtcatcggttttaccttcgggccggatggaggatagagtat

SEQ ID NO: 1055 - DNA, 62 bp, synthetic construct
  source 1..62: mol_type = other DNA
ggatagagtatagttgggcgaccagttttatgtgcaattcccgcggatggaggatagagtat

SEQ ID NO: 1056 - DNA, 60 bp, synthetic construct
  source 1..60: mol_type = other DNA
ataagatagtgagatgggagtcgcgacccttcctcccgatccgtgggtgataagatagtg

SEQ ID NO: 1057 - DNA, 62 bp, synthetic construct
  source 1..62: mol_type = other DNA
ataagatagtgagatgggtgacagaagtttacgtaccgaaaatggtgggtgataagatagtg

SEQ ID NO: 1058 - DNA, 61 bp, synthetic construct
  source 1..61: mol_type = other DNA
ataagatagtgagatgggtgtaggccaagaggaatcatgcccagtgggtgataagatagtg

SEQ ID NO: 1059 - DNA, 62 bp, synthetic construct
  source 1..62: mol_type = other DNA
ataagatagtgagatgggtggtcggccaagaggaatcatgcccagtgggtgataagatagtg

SEQ ID NO: 1060 - DNA, 61 bp, synthetic construct
  source 1..61: mol_type = other DNA
ataagatagtgagatgggtgagtcgcgacccttcctcccgttcgtgggtgataagatagtg

SEQ ID NO: 1061 - DNA, 62 bp, synthetic construct
  source 1..62: mol_type = other DNA
ataagatagtgagatgggacgatagaagtttacgtaccgaatatgtgggtgataagatagtg

SEQ ID NO: 1062 - DNA, 60 bp, synthetic construct
  source 1..60: mol_type = other DNA
ataagatagtgagatgggagctgccgggcagatgtcaagctggtgggtgataagatagtg

SEQ ID NO: 1063 - DNA, 61 bp, synthetic construct
  source 1..61: mol_type = other DNA
ataagatagtgagatgggtgagctgccgggcagatgtcaacctgtgggtgataagatagtg

SEQ ID NO: 1064 - DNA, 60 bp, synthetic construct
  source 1..60: mol_type = other DNA
ggatagagtatagttgggagtcgcgacccttcctcccgatccggatggaggatagagtat

SEQ ID NO: 1065 - DNA, 62 bp, synthetic construct
  source 1..62: mol_type = other DNA
ggatagagtatagttgggtgacagaagtttacgtaccgaaaatgggatggaggatagagtat

SEQ ID NO: 1066 - DNA, 61 bp, synthetic construct
  source 1..61: mol_type = other DNA
ggatagagtatagttgggtgtaggccaagaggaatcatgcccaggatggaggatagagtat

SEQ ID NO: 1067 - DNA, 62 bp, synthetic construct
  source 1..62: mol_type = other DNA
ggatagagtatagttgggtggtcggccaagaggaatcatgcccaggatggaggatagagtat

SEQ ID NO: 1068 - DNA, 61 bp, synthetic construct
  source 1..61: mol_type = other DNA
ggatagagtatagttgggtgagtcgcgacccttcctcccgttcggatggaggatagagtat

SEQ ID NO: 1069 - DNA, 62 bp, synthetic construct
  source 1..62: mol_type = other DNA
ggatagagtatagttgggacgatagaagtttacgtaccgaatatggatggaggatagagtat

SEQ ID NO: 1070 - DNA, 60 bp, synthetic construct
  source 1..60: mol_type = other DNA
ggatagagtatagttgggagctgccgggcagatgtcaagctgggatggaggatagagtat

SEQ ID NO: 1071 - DNA, 61 bp, synthetic construct
  source 1..61: mol_type = other DNA
ggatagagtatagttgggtgagctgccgggcagatgtcaacctggatggaggatagagtat

SEQ ID NO: 1072 - DNA, 61 bp, synthetic construct
  source 1..61: mol_type = other DNA
ggtaattgagtagaagggcgtggagggtccataccctccctgtgggatgaggtaattgagt

SEQ ID NO: 1073 - DNA, 62 bp, synthetic construct
  source 1..62: mol_type = other DNA
ggtaattgagtagaagggccgcggagggtccataccctccgtgtgggatgaggtaattgagt

SEQ ID NO: 1074 - DNA, 62 bp, synthetic construct
  source 1..62: mol_type = other DNA
ggtaattgagtagaagggtgccccggagggtccataccctcgctgggatgaggtaattgagt

SEQ ID NO: 1075 - DNA, 64 bp, synthetic construct
  source 1..64: mol_type = other DNA
ggtaattgagtagaagggtgccccggagggtccataccctccctgtgggatgaggtaattgagt

SEQ ID NO: 1076 - DNA, 60 bp, synthetic construct
  source 1..60: mol_type = other DNA
ggtaattgagtagaagggccgcggagggtccataccctcgctgggatgaggtaattgagt

SEQ ID NO: 1077 - DNA, 61 bp, synthetic construct
  source 1..61: mol_type = other DNA
ggtaattgagtagaagggcgtggagggtccataccctccgtgtgggatgaggtaattgagt

SEQ ID NO: 1078 - DNA, 61 bp, synthetic construct
  source 1..61: mol_type = other DNA
ggtaattgagtagaagggtgtggagggtccataccctccgtgtgggatgaggtaattgagt

SEQ ID NO: 1079 - DNA, 62 bp, synthetic construct
  source 1..62: mol_type = other DNA
ggtaattgagtagaagggccgcggagggtccataccctccctgtgggatgaggtaattgagt

SEQ ID NO: 1080 - DNA, 60 bp, synthetic construct
  source 1..60: mol_type = other DNA
ggatagagtatagttgggcgtggagggtccataccctccctgggatggaggatagagtat

SEQ ID NO: 1081 - DNA, 62 bp, synthetic construct
  source 1..62: mol_type = other DNA
ggatagagtatagttgggccgcggagggtccataccctccgtgtggatggaggatagagtat

SEQ ID NO: 1082 - DNA, 62 bp, synthetic construct
  source 1..62: mol_type = other DNA
ggatagagtatagttgggtgccccggagggtccataccctcgctggatggaggatagagtat

SEQ ID NO: 1083 - DNA, 63 bp, synthetic construct
  source 1..63: mol_type = other DNA
ggatagagtatagttgggtgccccggagggtccataccctccctgggatggaggatagagtat

SEQ ID NO: 1084 - DNA, 60 bp, synthetic construct
  source 1..60: mol_type = other DNA
ggatagagtatagttgggccgcggagggtccataccctcgctggatggaggatagagtat

SEQ ID NO: 1085 - DNA, 61 bp, synthetic construct
  source 1..61: mol_type = other DNA
ggatagagtatagttgggcgtggagggtccataccctccgtgtggatggaggatagagtat

SEQ ID NO: 1086 - DNA, 61 bp, synthetic construct
  source 1..61: mol_type = other DNA
ggatagagtatagttgggtgtggagggtccataccctccgtgtggatggaggatagagtat

SEQ ID NO: 1087 - DNA, 61 bp, synthetic construct
  source 1..61: mol_type = other DNA
ggatagagtatagttgggccgcggagggtccataccctccctgggatggaggatagagtat

SEQ ID NO: 1088 - DNA, 61 bp, synthetic construct
  source 1..61: mol_type = other DNA
gtaatagatatgagggtggagcggcactctagaaaaacagaaatgggagggtaatagatat

SEQ ID NO: 1089 - DNA, 60 bp, synthetic construct
  source 1..60: mol_type = other DNA
gtaatagatatgagggtgaattttgggatttgctaggcaagctgggagggtaatagatat

SEQ ID NO: 1090 - DNA, 60 bp, synthetic construct
  source 1..60: mol_type = other DNA
gtaatagatatgagggtggagcggcactctagaaaaacacaatgggagggtaatagatat

SEQ ID NO: 1091 - DNA, 63 bp, synthetic construct
  source 1..63: mol_type = other DNA
gtaatagatatgagggtgagtccgaagagatcatcttaaatggaatgggagggtaatagatat

SEQ ID NO: 1092 - DNA, 60 bp, synthetic construct
  source 1..60: mol_type = other DNA
gtaatagatatgagggtgcaattttgggatttgctaggctagtgggagggtaatagatat

SEQ ID NO: 1093 - DNA, 62 bp, synthetic construct
  source 1..62: mol_type = other DNA
gtaatagatatgagggtggagcggcactctagaaaaacagtaagtgggagggtaatagatat

SEQ ID NO: 1094 - DNA, 63 bp, synthetic construct
  source 1..63: mol_type = other DNA
gtaatagatatgagggtggcgagtcatataagactcaatccgttctgggagggtaatagatat

SEQ ID NO: 1095 - DNA, 62 bp, synthetic construct
  source 1..62: mol_type = other DNA
gtaatagatatgagggtgcgagtcatataagactcaatccgttctgggagggtaatagatat

SEQ ID NO: 1096 - DNA, 61 bp, synthetic construct
  source 1..61: mol_type = other DNA
tgtaatagtaaggagggagagcggcactctagaaaaacagaaagggtgagtgtaatagtaa

SEQ ID NO: 1097 - DNA, 60 bp, synthetic construct
  source 1..60: mol_type = other DNA
tgtaatagtaaggagggaaattttgggatttgctaggcaagcgggtgagtgtaatagtaa

SEQ ID NO: 1098 - DNA, 60 bp, synthetic construct
  source 1..60: mol_type = other DNA
tgtaatagtaaggagggagagcggcactctagaaaaacacaagggtgagtgtaatagtaa

SEQ ID NO: 1099 - DNA, 63 bp, synthetic construct
  source 1..63: mol_type = other DNA
tgtaatagtaaggagggaagtccgaagagatcatcttaaatggaagggtgagtgtaatagtaa

SEQ ID NO: 1100 - DNA, 61 bp, synthetic construct
  source 1..61: mol_type = other DNA
tgtaatagtaaggagggacaattttgggatttgctaggctagtgggtgagtgtaatagtaa

SEQ ID NO: 1101 - DNA, 63 bp, synthetic construct
  source 1..63: mol_type = other DNA
tgtaatagtaaggagggagagcggcactctagaaaaacagtaagtgggtgagtgtaatagtaa

SEQ ID NO: 1102 - DNA, 63 bp, synthetic construct
  source 1..63: mol_type = other DNA
tgtaatagtaaggagggagcgagtcatataagactcaatccgttcgggtgagtgtaatagtaa

SEQ ID NO: 1103 - DNA, 62 bp, synthetic construct
  source 1..62: mol_type = other DNA
tgtaatagtaaggagggacgagtcatataagactcaatccgttcgggtgagtgtaatagtaa

SEQ ID NO: 1104 - DNA, 62 bp, synthetic construct
  source 1..62: mol_type = other DNA
ggaatttagtgagaagggtgtcgcgggctcatcttatacttggtgggtgttggaatttagtg

SEQ ID NO: 1105 - DNA, 60 bp, synthetic construct
  source 1..60: mol_type = other DNA
ggaatttagtgagaagggttttcctcaaaatcgcttcgcagcgggtgttggaatttagtg

SEQ ID NO: 1106 - DNA, 60 bp, synthetic construct
  source 1..60: mol_type = other DNA
ggaatttagtgagaagggattccctgcctttcacttcagtgagggtgttggaatttagtg

SEQ ID NO: 1107 - DNA, 61 bp, synthetic construct
  source 1..61: mol_type = other DNA
ggaatttagtgagaagggaacccagattactcctttgccaggtgggtgttggaatttagtg

SEQ ID NO: 1108 - DNA, 60 bp, synthetic construct
  source 1..60: mol_type = other DNA
ggaatttagtgagaagggccagggagatgtcaagacttgcatgggtgttggaatttagtg

SEQ ID NO: 1109 - DNA, 60 bp, synthetic construct
  source 1..60: mol_type = other DNA
ggaatttagtgagaagggcgtttccaaagcagttcagggcaagggtgttggaatttagtg

SEQ ID NO: 1110 - DNA, 61 bp, synthetic construct
  source 1..61: mol_type = other DNA
ggaatttagtgagaagggtttttcctcaaaatcgcttcggagtgggtgttggaatttagtg

SEQ ID NO: 1111 - DNA, 62 bp, synthetic construct
  source 1..62: mol_type = other DNA
ggaatttagtgagaagggagtcgcgggctcatcttatacttggtgggtgttggaatttagtg

SEQ ID NO: 1112 - DNA, 61 bp, synthetic construct
  source 1..61: mol_type = other DNA
tgtaatagtaaggagggagtcgcgggctcatcttatacttggtgggtgagtgtaatagtaa

SEQ ID NO: 1113 - DNA, 60 bp, synthetic construct
  source 1..60: mol_type = other DNA
tgtaatagtaaggagggattttcctcaaaatcgcttcgcagcgggtgagtgtaatagtaa

SEQ ID NO: 1114 - DNA, 60 bp, synthetic construct
  source 1..60: mol_type = other DNA
tgtaatagtaaggagggaattccctgcctttcacttcagtgagggtgagtgtaatagtaa

SEQ ID NO: 1115 - DNA, 61 bp, synthetic construct
  source 1..61: mol_type = other DNA
tgtaatagtaaggagggaaacccagattactcctttgccaggtgggtgagtgtaatagtaa

SEQ ID NO: 1116 - DNA, 60 bp, synthetic construct
  source 1..60: mol_type = other DNA
tgtaatagtaaggagggaccagggagatgtcaagacttgcatgggtgagtgtaatagtaa

SEQ ID NO: 1117 - DNA, 60 bp, synthetic construct
  source 1..60: mol_type = other DNA
tgtaatagtaaggagggacgtttccaaagcagttcagggcaagggtgagtgtaatagtaa

SEQ ID NO: 1118 - DNA, 61 bp, synthetic construct
  source 1..61: mol_type = other DNA
tgtaatagtaaggagggatttttcctcaaaatcgcttcggagtgggtgagtgtaatagtaa

SEQ ID NO: 1119 - DNA, 62 bp, synthetic construct
  source 1..62: mol_type = other DNA
tgtaatagtaaggagggaagtcgcgggctcatcttatacttggtgggtgagtgtaatagtaa

SEQ ID NO: 1120 - DNA, 63 bp, synthetic construct
  source 1..63: mol_type = other DNA
ataagatagtgagatgggtgtagaaaacttccgtactaagacagggtgggtgataagatagtg

SEQ ID NO: 1121 - DNA, 60 bp, synthetic construct
  source 1..60: mol_type = other DNA
ataagatagtgagatgggtaaatggaaatatcatgcggttaggtgggtgataagatagtg

SEQ ID NO: 1122 - DNA, 61 bp, synthetic construct
  source 1..61: mol_type = other DNA
ataagatagtgagatgggaacggaaatatcatgcggtatcagggtgggtgataagatagtg

SEQ ID NO: 1123 - DNA, 60 bp, synthetic construct
  source 1..60: mol_type = other DNA
ataagatagtgagatgggttgccgtactaagaccccgttgctgtgggtgataagatagtg

SEQ ID NO: 1124 - DNA, 60 bp, synthetic construct
  source 1..60: mol_type = other DNA
ataagatagtgagatgggaaacttctgacttgcatggcccgggtgggtgataagatagtg

SEQ ID NO: 1125 - DNA, 61 bp, synthetic construct
  source 1..61: mol_type = other DNA
ataagatagtgagatgggaggaaacttccgtactaagaccggcgtgggtgataagatagtg

SEQ ID NO: 1126 - DNA, 62 bp, synthetic construct
  source 1..62: mol_type = other DNA
ataagatagtgagatgggtggtcgaaaacttccgtactaagtgggtgggtgataagatagtg

SEQ ID NO: 1127 - DNA, 60 bp, synthetic construct
  source 1..60: mol_type = other DNA
ataagatagtgagatgggatagatggaaatatcatgcggatagtgggtgataagatagtg

SEQ ID NO: 1128 - DNA, 63 bp, synthetic construct
  source 1..63: mol_type = other DNA
tgtaatagtaaggagggagtagaaaacttccgtactaagacaggtgggtgagtgtaatagtaa

SEQ ID NO: 1129 - DNA, 61 bp, synthetic construct
  source 1..61: mol_type = other DNA
tgtaatagtaaggagggataaatggaaatatcatgcggttagtgggtgagtgtaatagtaa

SEQ ID NO: 1130 - DNA, 62 bp, synthetic construct
  source 1..62: mol_type = other DNA
tgtaatagtaaggagggaaacggaaatatcatgcggtatcaggtgggtgagtgtaatagtaa

SEQ ID NO: 1131 - DNA, 60 bp, synthetic construct
  source 1..60: mol_type = other DNA
tgtaatagtaaggagggattgccgtactaagaccccgttgctgggtgagtgtaatagtaa

SEQ ID NO: 1132 - DNA, 61 bp, synthetic construct
  source 1..61: mol_type = other DNA
tgtaatagtaaggagggaaaacttctgacttgcatggcccggtgggtgagtgtaatagtaa

SEQ ID NO: 1133 - DNA, 61 bp, synthetic construct
  source 1..61: mol_type = other DNA
tgtaatagtaaggagggaaggaaacttccgtactaagaccggcgggtgagtgtaatagtaa

SEQ ID NO: 1134 - DNA, 62 bp, synthetic construct
  source 1..62: mol_type = other DNA
tgtaatagtaaggagggaggtcgaaaacttccgtactaagtggtgggtgagtgtaatagtaa

SEQ ID NO: 1135 - DNA, 60 bp, synthetic construct
  source 1..60: mol_type = other DNA
tgtaatagtaaggagggaatagatggaaatatcatgcggatagggtgagtgtaatagtaa

SEQ ID NO: 1136 - DNA, 61 bp, synthetic construct
  source 1..61: mol_type = other DNA
ttaatatgggtagttgggtcgtgcgactcagctgcattatcgcgggtgtgttaatatgggt

SEQ ID NO: 1137 - DNA, 60 bp, synthetic construct
  source 1..60: mol_type = other DNA
ttaatatgggtagttgggctcatgcgactcagctgcatttacgggtgtgttaatatgggt

SEQ ID NO: 1138 - DNA, 62 bp, synthetic construct
  source 1..62: mol_type = other DNA
ttaatatgggtagttgggtggtcgactcagctgcattatgcccagggtgtgttaatatgggt

SEQ ID NO: 1139 - DNA, 61 bp, synthetic construct
  source 1..61: mol_type = other DNA
ttaatatgggtagttgggtgtagactcagctgcattatgcccagggtgtgttaatatgggt

SEQ ID NO: 1140 - DNA, 61 bp, synthetic construct
  source 1..61: mol_type = other DNA
ttaatatgggtagttgggtggtcgactcagctgcattatggccgggtgtgttaatatgggt

SEQ ID NO: 1141 - DNA, 61 bp, synthetic construct
  source 1..61: mol_type = other DNA
ttaatatgggtagttgggtcgtgcgactcagctgcattaacgtgggtgtgttaatatgggt

SEQ ID NO: 1142 - DNA, 60 bp, synthetic construct
  source 1..60: mol_type = other DNA
ttaatatgggtagttgggcgggcgactcagctgcattatcgcgggtgtgttaatatgggt

SEQ ID NO: 1143 - DNA, 61 bp, synthetic construct
  source 1..61: mol_type = other DNA
ttaatatgggtagttgggcgggcgactcagctgcattatggccgggtgtgttaatatgggt

SEQ ID NO: 1144 - DNA, 61 bp, synthetic construct
  source 1..61: mol_type = other DNA
tgtaatagtaaggagggatcgtgcgactcagctgcattatcgcgggtgagtgtaatagtaa

SEQ ID NO: 1145 - DNA, 60 bp, synthetic construct
  source 1..60: mol_type = other DNA
tgtaatagtaaggagggactcatgcgactcagctgcatttacgggtgagtgtaatagtaa

SEQ ID NO: 1146 - DNA, 61 bp, synthetic construct
  source 1..61: mol_type = other DNA
tgtaatagtaaggagggaggtcgactcagctgcattatgcccagggtgagtgtaatagtaa

SEQ ID NO: 1147 - DNA, 60 bp, synthetic construct
  source 1..60: mol_type = other DNA
tgtaatagtaaggagggagtagactcagctgcattatgcccagggtgagtgtaatagtaa

SEQ ID NO: 1148 - DNA, 60 bp, synthetic construct
  source 1..60: mol_type = other DNA
tgtaatagtaaggagggaggtcgactcagctgcattatggccgggtgagtgtaatagtaa

SEQ ID NO: 1149 - DNA, 61 bp, synthetic construct
  source 1..61: mol_type = other DNA
tgtaatagtaaggagggatcgtgcgactcagctgcattaacgtgggtgagtgtaatagtaa

SEQ ID NO: 1150 - DNA, 60 bp, synthetic construct
  source 1..60: mol_type = other DNA
tgtaatagtaaggagggacgggcgactcagctgcattatcgcgggtgagtgtaatagtaa

SEQ ID NO: 1151 - DNA, 61 bp, synthetic construct
  source 1..61: mol_type = other DNA
tgtaatagtaaggagggacgggcgactcagctgcattatggccgggtgagtgtaatagtaa

SEQ ID NO: 1152 - DNA, 60 bp, synthetic construct
  source 1..60: mol_type = other DNA
gtaatagatatgagggtggtcccatccatatccacagctcagtgggagggtaatagatat

SEQ ID NO: 1153 - DNA, 60 bp, synthetic construct
  source 1..60: mol_type = other DNA
gtaatagatatgagggtggacgcactgaattctctccaagtgtgggagggtaatagatat

SEQ ID NO: 1154 - DNA, 64 bp, synthetic construct
  source 1..64: mol_type = other DNA
gtaatagatatgagggtgaaatcttacaacagagctttacgatggctgggagggtaatagatat

SEQ ID NO: 1155 - DNA, 65 bp, synthetic construct
  source 1..65: mol_type = other DNA
gtaatagatatgagggtggctgcttttacttcagacttatacaaggctgggagggtaatagatat

SEQ ID NO: 1156 - DNA, 60 bp, synthetic construct
  source 1..60: mol_type = other DNA
gtaatagatatgagggtggtcagctgtgaaatgtactcccaatgggagggtaatagatat

SEQ ID NO: 1157 - DNA, 60 bp, synthetic construct
  source 1..60: mol_type = other DNA
gtaatagatatgagggtgagaagggcctttattgccatgagttgggagggtaatagatat

SEQ ID NO: 1158 - DNA, 61 bp, synthetic construct
  source 1..61: mol_type = other DNA
gtaatagatatgagggtgaaagttccgcttacaatctcttcgatgggagggtaatagatat

SEQ ID NO: 1159 - DNA, 62 bp, synthetic construct
  source 1..62: mol_type = other DNA
gtaatagatatgagggtgctgctcactcccgtaggttgtgcgtgtgggagggtaatagatat

SEQ ID NO: 1160 - DNA, 61 bp, synthetic construct
  source 1..61: mol_type = other DNA
tatagttatggagaagggtgtcccatccatatccacagctcagggaagggtatagttatgg

SEQ ID NO: 1161 - DNA, 61 bp, synthetic construct
  source 1..61: mol_type = other DNA
tatagttatggagaagggtgacgcactgaattctctccaagtgggaagggtatagttatgg

SEQ ID NO: 1162 - DNA, 64 bp, synthetic construct
  source 1..64: mol_type = other DNA
tatagttatggagaagggaaatcttacaacagagctttacgatggcggaagggtatagttatgg

SEQ ID NO: 1163 - DNA, 66 bp, synthetic construct
  source 1..66: mol_type = other DNA
tatagttatggagaagggtgctgcttttacttcagacttatacaaggcggaagggtatagttatgg

SEQ ID NO: 1164 - DNA, 61 bp, synthetic construct
  source 1..61: mol_type = other DNA
tatagttatggagaagggtgtcagctgtgaaatgtactcccaaggaagggtatagttatgg

SEQ ID NO: 1165 - DNA, 60 bp, synthetic construct
  source 1..60: mol_type = other DNA
tatagttatggagaagggagaagggcctttattgccatgagtggaagggtatagttatgg

SEQ ID NO: 1166 - DNA, 61 bp, synthetic construct
  source 1..61: mol_type = other DNA
tatagttatggagaagggaaagttccgcttacaatctcttcgaggaagggtatagttatgg

SEQ ID NO: 1167 - DNA, 62 bp, synthetic construct
  source 1..62: mol_type = other DNA
tatagttatggagaagggctgctcactcccgtaggttgtgcgtgggaagggtatagttatgg

SEQ ID NO: 1168 - DNA, 62 bp, synthetic construct
  source 1..62: mol_type = other DNA
ggaatttagtgagaagggagagtcaggtactgtcactttcaagtgggtgttggaatttagtg

SEQ ID NO: 1169 - DNA, 62 bp, synthetic construct
  source 1..62: mol_type = other DNA
ggaatttagtgagaagggtgaatcaggtactgtcactttcaagtgggtgttggaatttagtg

SEQ ID NO: 1170 - DNA, 62 bp, synthetic construct
  source 1..62: mol_type = other DNA
ggaatttagtgagaagggaatcaggtactgtcactttcttaggtgggtgttggaatttagtg

SEQ ID NO: 1171 - DNA, 62 bp, synthetic construct
  source 1..62: mol_type = other DNA
ggaatttagtgagaagggccctcttagtcaggtactgtcacaaagggtgttggaatttagtg

SEQ ID NO: 1172 - DNA, 63 bp, synthetic construct
  source 1..63: mol_type = other DNA
ggaatttagtgagaagggagagtcaggtactgtcactttctaggtgggtgttggaatttagtg

SEQ ID NO: 1173 - DNA, 60 bp, synthetic construct
  source 1..60: mol_type = other DNA
ggaatttagtgagaagggagagtcaggtactgtcactttgaagggtgttggaatttagtg

SEQ ID NO: 1174 - DNA, 61 bp, synthetic construct
  source 1..61: mol_type = other DNA
ggaatttagtgagaagggatcaggtactgtcactttcttcggagggtgttggaatttagtg

SEQ ID NO: 1175 - DNA, 63 bp, synthetic construct
  source 1..63: mol_type = other DNA
ggaatttagtgagaagggtgaatcaggtactgtcactttctaggtgggtgttggaatttagtg

SEQ ID NO: 1176 - DNA, 61 bp, synthetic construct
  source 1..61: mol_type = other DNA
tatagttatggagaagggagagtcaggtactgtcactttcaagggaagggtatagttatgg

SEQ ID NO: 1177 - DNA, 61 bp, synthetic construct
  source 1..61: mol_type = other DNA
tatagttatggagaagggtgaatcaggtactgtcactttcaagggaagggtatagttatgg

SEQ ID NO: 1178 - DNA, 62 bp, synthetic construct
  source 1..62: mol_type = other DNA
tatagttatggagaagggaatcaggtactgtcactttcttaggtggaagggtatagttatgg

SEQ ID NO: 1179 - DNA, 62 bp, synthetic construct
  source 1..62: mol_type = other DNA
tatagttatggagaagggccctcttagtcaggtactgtcacaaaggaagggtatagttatgg

SEQ ID NO: 1180 - DNA, 63 bp, synthetic construct
  source 1..63: mol_type = other DNA
tatagttatggagaagggagagtcaggtactgtcactttctaggtggaagggtatagttatgg

SEQ ID NO: 1181 - DNA, 60 bp, synthetic construct
  source 1..60: mol_type = other DNA
tatagttatggagaagggagagtcaggtactgtcactttgaaggaagggtatagttatgg

SEQ ID NO: 1182 - DNA, 61 bp, synthetic construct
  source 1..61: mol_type = other DNA
tatagttatggagaagggatcaggtactgtcactttcttcggaggaagggtatagttatgg

SEQ ID NO: 1183 - DNA, 63 bp, synthetic construct
  source 1..63: mol_type = other DNA
tatagttatggagaagggtgaatcaggtactgtcactttctaggtggaagggtatagttatgg

SEQ ID NO: 1184 - DNA, 60 bp, synthetic construct
  source 1..60: mol_type = other DNA
ataagatagtgagatgggatcagttcgttatgcaatcctgtcgtgggtgataagatagtg

SEQ ID NO: 1185 - DNA, 61 bp, synthetic construct
  source 1..61: mol_type = other DNA
ataagatagtgagatgggcgaggcaccgaggattcctcccgctgtgggtgataagatagtg

SEQ ID NO: 1186 - DNA, 62 bp, synthetic construct
  source 1..62: mol_type = other DNA
ataagatagtgagatgggtacggcccatcttttaccgaatattagtgggtgataagatagtg

SEQ ID NO: 1187 - DNA, 62 bp, synthetic construct
  source 1..62: mol_type = other DNA
ataagatagtgagatgggcgacaattattttcgctcgacttcgtgtgggtgataagatagtg

SEQ ID NO: 1188 - DNA, 61 bp, synthetic construct
  source 1..61: mol_type = other DNA
ataagatagtgagatgggtgacactgggtttttgtgctttcgagtgggtgataagatagtg

SEQ ID NO: 1189 - DNA, 63 bp, synthetic construct
  source 1..63: mol_type = other DNA
ataagatagtgagatgggctagggcccatcttttaccgaatattagtgggtgataagatagtg

SEQ ID NO: 1190 - DNA, 60 bp, synthetic construct
  source 1..60: mol_type = other DNA
ataagatagtgagatgggcgaactttgtttccagccattcatgtgggtgataagatagtg

SEQ ID NO: 1191 - DNA, 61 bp, synthetic construct
  source 1..61: mol_type = other DNA
ataagatagtgagatgggcgacaattattttcgctcgactacggtgggtgataagatagtg

SEQ ID NO: 1192 - DNA, 60 bp, synthetic construct
  source 1..60: mol_type = other DNA
tatagttatggagaagggatcagttcgttatgcaatcctgtcggaagggtatagttatgg

SEQ ID NO: 1193 - DNA, 61 bp, synthetic construct
  source 1..61: mol_type = other DNA
tatagttatggagaagggcgaggcaccgaggattcctcccgctggaagggtatagttatgg

SEQ ID NO: 1194 - DNA, 62 bp, synthetic construct
  source 1..62: mol_type = other DNA
tatagttatggagaagggtacggcccatcttttaccgaatattaggaagggtatagttatgg

SEQ ID NO: 1195 - DNA, 62 bp, synthetic construct
  source 1..62: mol_type = other DNA
tatagttatggagaagggcgacaattattttcgctcgacttcgtggaagggtatagttatgg

SEQ ID NO: 1196 - DNA, 61 bp, synthetic construct
  source 1..61: mol_type = other DNA
tatagttatggagaagggtgacactgggtttttgtgctttcgaggaagggtatagttatgg

SEQ ID NO: 1197 - DNA, 63 bp, synthetic construct
  source 1..63: mol_type = other DNA
tatagttatggagaagggctagggcccatcttttaccgaatattaggaagggtatagttatgg

SEQ ID NO: 1198 - DNA, 60 bp, synthetic construct
  source 1..60: mol_type = other DNA
tatagttatggagaagggcgaactttgtttccagccattcatggaagggtatagttatgg

SEQ ID NO: 1199 - DNA, 61 bp, synthetic construct
  source 1..61: mol_type = other DNA
tatagttatggagaagggcgacaattattttcgctcgactacgggaagggtatagttatgg

SEQ ID NO: 1200 - DNA, 62 bp, synthetic construct
  source 1..62: mol_type = other DNA
ttaatatgggtagttgggtgtgggaattccgatctccccttggtgggtgtgttaatatgggt

SEQ ID NO: 1201 - DNA, 62 bp, synthetic construct
  source 1..62: mol_type = other DNA
ttaatatgggtagttgggtgtgggaattccgatctcccctaggcgggtgtgttaatatgggt

SEQ ID NO: 1202 - DNA, 62 bp, synthetic construct
  source 1..62: mol_type = other DNA
ttaatatgggtagttgggatgcgcctactacctaatgggcgcgtgggtgtgttaatatgggt

SEQ ID NO: 1203 - DNA, 61 bp, synthetic construct
  source 1..61: mol_type = other DNA
ttaatatgggtagttgggtgtgggaattccgatctccccatgtgggtgtgttaatatgggt

SEQ ID NO: 1204 - DNA, 60 bp, synthetic construct
  source 1..60: mol_type = other DNA
ttaatatgggtagttgggatacgcctactacctaatgggagcgggtgtgttaatatgggt

SEQ ID NO: 1205 - DNA, 62 bp, synthetic construct; identical to SEQ ID NO: 1200
  source 1..62: mol_type = other DNA

SEQ ID NO: 1206 - DNA, 61 bp, synthetic construct
  source 1..61: mol_type = other DNA
ttaatatgggtagttgggtgggcctactacctaatgggcccgcgggtgtgttaatatgggt

SEQ ID NO: 1207 - DNA, 61 bp, synthetic construct
  source 1..61: mol_type = other DNA
ttaatatgggtagttgggtgggcctactacctaatgggcgcgtgggtgtgttaatatgggt

SEQ ID NO: 1208 - DNA, 62 bp, synthetic construct
  source 1..62: mol_type = other DNA
tatagttatggagaagggtgtgggaattccgatctccccttggtggaagggtatagttatgg

SEQ ID NO: 1209 - DNA, 62 bp, synthetic construct
  source 1..62: mol_type = other DNA
tatagttatggagaagggtgtgggaattccgatctcccctaggcggaagggtatagttatgg

SEQ ID NO: 1210 - DNA, 61 bp, synthetic construct
  source 1..61: mol_type = other DNA
tatagttatggagaagggatgcgcctactacctaatgggcgcgggaagggtatagttatgg

SEQ ID NO: 1211 - DNA, 60 bp, synthetic construct
  source 1..60: mol_type = other DNA
tatagttatggagaagggtgtgggaattccgatctccccatgggaagggtatagttatgg

SEQ ID NO: 1212 - DNA, 60 bp, synthetic construct
  source 1..60: mol_type = other DNA
tatagttatggagaagggatacgcctactacctaatgggagcggaagggtatagttatgg

SEQ ID NO: 1213 - DNA, 62 bp, synthetic construct; identical to SEQ ID NO: 1208
  source 1..62: mol_type = other DNA

SEQ ID NO: 1214 - DNA, 61 bp, synthetic construct
  source 1..61: mol_type = other DNA
tatagttatggagaagggtgggcctactacctaatgggcccgcggaagggtatagttatgg

SEQ ID NO: 1215 - DNA, 60 bp, synthetic construct
  source 1..60: mol_type = other DNA
tatagttatggagaagggtgggcctactacctaatgggcgcgggaagggtatagttatgg

SEQ ID NO: 1216 - DNA, 61 bp, synthetic construct
  source 1..61: mol_type = other DNA
ggtaattgagtagaagggatacaccctaattaccagtccatgtgggatgaggtaattgagt

SEQ ID NO: 1217 - DNA, 61 bp, synthetic construct
  source 1..61: mol_type = other DNA
ggtaattgagtagaagggtgtcgcgagctcatctttggacctagggatgaggtaattgagt

SEQ ID NO: 1218 - DNA, 62 bp, synthetic construct
  source 1..62: mol_type = other DNA
ggtaattgagtagaagggcaagtccccgattaaagatcttatgtgggatgaggtaattgagt

SEQ ID NO: 1219 - DNA, 60 bp, synthetic construct
  source 1..60: mol_type = other DNA
ggtaattgagtagaagggattccccagatttcacttctgtgagggatgaggtaattgagt

SEQ ID NO: 1220 - DNA, 60 bp, synthetic construct
  source 1..60: mol_type = other DNA
ggtaattgagtagaagggcctgggtcaatacctcccacaggagggatgaggtaattgagt

SEQ ID NO: 1221 - DNA, 63 bp, synthetic construct
  source 1..63: mol_type = other DNA
ggtaattgagtagaagggtggatgtatcaactaaccgtaaggcaagggatgaggtaattgagt

SEQ ID NO: 1222 - DNA, 60 bp, synthetic construct
  source 1..60: mol_type = other DNA
ggtaattgagtagaagggaaattccctctgtatgactgcgtagggatgaggtaattgagt

SEQ ID NO: 1223 - DNA, 61 bp, synthetic construct
  source 1..61: mol_type = other DNA
ggtaattgagtagaagggtgccgttatcccccatccaaagcgtgggatgaggtaattgagt

SEQ ID NO: 1224 - DNA, 60 bp, synthetic construct
  source 1..60: mol_type = other DNA
tatagttatggagaagggatacaccctaattaccagtccatgggaagggtatagttatgg

SEQ ID NO: 1225 - DNA, 61 bp, synthetic construct
  source 1..61: mol_type = other DNA
tatagttatggagaagggtgtcgcgagctcatctttggacctaggaagggtatagttatgg

SEQ ID NO: 1226 - DNA, 61 bp, synthetic construct
  source 1..61: mol_type = other DNA
tatagttatggagaagggcaagtccccgattaaagatcttatgggaagggtatagttatgg

SEQ ID NO: 1227 - DNA, 60 bp, synthetic construct
  source 1..60: mol_type = other DNA
tatagttatggagaagggattccccagatttcacttctgtgaggaagggtatagttatgg

SEQ ID NO: 1228 - DNA, 60 bp, synthetic construct
  source 1..60: mol_type = other DNA
tatagttatggagaagggcctgggtcaatacctcccacaggaggaagggtatagttatgg

SEQ ID NO: 1229 - DNA, 63 bp, synthetic construct
  source 1..63: mol_type = other DNA
tatagttatggagaagggtggatgtatcaactaaccgtaaggcaaggaagggtatagttatgg

SEQ ID NO: 1230 - DNA, 60 bp, synthetic construct
  source 1..60: mol_type = other DNA
tatagttatggagaagggaaattccctctgtatgactgcgtaggaagggtatagttatgg

SEQ ID NO: 1231 - DNA, 61 bp, synthetic construct
  source 1..61: mol_type = other DNA
tatagttatggagaagggtgccgttatcccccatccaaagcgtggaagggtatagttatgg

SEQ ID NO: 1232 - DNA, 60 bp, synthetic construct
  source 1..60: mol_type = other DNA
gtaatagatatgagggtgcgactctttacagttggctcagtctgggagggtaatagatat

SEQ ID NO: 1233 - DNA, 60 bp, synthetic construct
  source 1..60: mol_type = other DNA
gtaatagatatgagggtgaagatcactgtgttgcttcccagatgggagggtaatagatat

SEQ ID NO: 1234 - DNA, 63 bp, synthetic construct
  source 1..63: mol_type = other DNA
gtaatagatatgagggtgtaggcgataaaattagtatatgcgcattgggagggtaatagatat

SEQ ID NO: 1235 - DNA, 65 bp, synthetic construct
  source 1..65: mol_type = other DNA
gtaatagatatgagggtggaaaaagtaaactttcgattaagttccaatgggagggtaatagatat

SEQ ID NO: 1236 - DNA, 60 bp, synthetic construct
  source 1..60: mol_type = other DNA
gtaatagatatgagggtgacgcctctttacagttggctctgttgggagggtaatagatat

SEQ ID NO: 1237 - DNA, 60 bp, synthetic construct
  source 1..60: mol_type = other DNA
gtaatagatatgagggtggaacatcactgtgttgcttccgagtgggagggtaatagatat

SEQ ID NO: 1238 - DNA, 64 bp, synthetic construct
  source 1..64: mol_type = other DNA
gtaatagatatgagggtgatatgcgataaaattagtatatgcgcattgggagggtaatagatat

SEQ ID NO: 1239 - DNA, 63 bp, synthetic construct
  source 1..63: mol_type = other DNA
gtaatagatatgagggtggttgtaaactttcgattaagttcgaagtgggagggtaatagatat

SEQ ID NO: 1240 - DNA, 60 bp, synthetic construct
  source 1..60: mol_type = other DNA
gataagtaagtagggatgcgactctttacagttggctcagtcggtggaggataagtaagt

SEQ ID NO: 1241 - DNA, 60 bp, synthetic construct
  source 1..60: mol_type = other DNA
gataagtaagtagggatgaagatcactgtgttgcttcccagaggtggaggataagtaagt

SEQ ID NO: 1242 - DNA, 63 bp, synthetic construct
  source 1..63: mol_type = other DNA
gataagtaagtagggatgtaggcgataaaattagtatatgcgcatggtggaggataagtaagt

SEQ ID NO: 1243 - DNA, 65 bp, synthetic construct
  source 1..65: mol_type = other DNA
gataagtaagtagggatggaaaaagtaaactttcgattaagttccaaggtggaggataagtaagt

SEQ ID NO: 1244 - DNA, 60 bp, synthetic construct
  source 1..60: mol_type = other DNA
gataagtaagtagggatgacgcctctttacagttggctctgtggtggaggataagtaagt

SEQ ID NO: 1245 - DNA, 60 bp, synthetic construct
  source 1..60: mol_type = other DNA
gataagtaagtagggatggaacatcactgtgttgcttccgagggtggaggataagtaagt

SEQ ID NO: 1246 - DNA, 64 bp, synthetic construct
  source 1..64: mol_type = other DNA
gataagtaagtagggatgatatgcgataaaattagtatatgcgcatggtggaggataagtaagt

SEQ ID NO: 1247 - DNA, 63 bp, synthetic construct
  source 1..63: mol_type = other DNA
gataagtaagtagggatggttgtaaactttcgattaagttcgaagggtggaggataagtaagt

SEQ ID NO: 1248 - DNA, 61 bp, synthetic construct
  source 1..61: mol_type = other DNA
ggaatttagtgagaagggtccgatgtcaaggactggtaagcaagggtgttggaatttagtg

SEQ ID NO: 1249 - DNA, 62 bp, synthetic construct
  source 1..62: mol_type = other DNA
ggaatttagtgagaagggtgcctcgcctcactctgttggctggtgggtgttggaatttagtg

SEQ ID NO: 1250 - DNA, 61 bp, synthetic construct
  source 1..61: mol_type = other DNA
ggaatttagtgagaagggtgtcggatgtcaaggactggtatccgggtgttggaatttagtg

SEQ ID NO: 1251 - DNA, 61 bp, synthetic construct
  source 1..61: mol_type = other DNA
ggaatttagtgagaagggcgggcaggcttatgcggtatttcgtgggtgttggaatttagtg

SEQ ID NO: 1252 - DNA, 63 bp, synthetic construct
  source 1..63: mol_type = other DNA
ggaatttagtgagaagggacgtcttccctccggagagttccgagcgggtgttggaatttagtg

SEQ ID NO: 1253 - DNA, 61 bp, synthetic construct
  source 1..61: mol_type = other DNA
ggaatttagtgagaagggagacctccggagagttccgtcccgtgggtgttggaatttagtg

SEQ ID NO: 1254 - DNA, 60 bp, synthetic construct
  source 1..60: mol_type = other DNA
ggaatttagtgagaagggtggagttatcgagcctgccttgctgggtgttggaatttagtg

SEQ ID NO: 1255 - DNA, 61 bp, synthetic construct
  source 1..61: mol_type = other DNA
ggaatttagtgagaagggtggacaggcttatgcggtattacgtgggtgttggaatttagtg

SEQ ID NO: 1256 - DNA, 61 bp, synthetic construct
  source 1..61: mol_type = other DNA
gataagtaagtagggatgtccgatgtcaaggactggtaagcaaggtggaggataagtaagt

SEQ ID NO: 1257 - DNA, 61 bp, synthetic construct
  source 1..61: mol_type = other DNA
gataagtaagtagggatggcctcgcctcactctgttggctggtggtggaggataagtaagt

SEQ ID NO: 1258 - DNA, 60 bp, synthetic construct
  source 1..60: mol_type = other DNA
gataagtaagtagggatggtcggatgtcaaggactggtatccggtggaggataagtaagt

SEQ ID NO: 1259 - DNA, 60 bp, synthetic construct
  source 1..60: mol_type = other DNA
gataagtaagtagggatgcgggcaggcttatgcggtatttcgggtggaggataagtaagt

SEQ ID NO: 1260 - DNA, 63 bp, synthetic construct
  source 1..63: mol_type = other DNA
gataagtaagtagggatgacgtcttccctccggagagttccgagcggtggaggataagtaagt

SEQ ID NO: 1261 - DNA, 60 bp, synthetic construct
  source 1..60: mol_type = other DNA
gataagtaagtagggatgagacctccggagagttccgtcccgggtggaggataagtaagt

SEQ ID NO: 1262 - DNA, 60 bp, synthetic construct
  source 1..60: mol_type = other DNA
gataagtaagtagggatgtggagttatcgagcctgccttgctggtggaggataagtaagt

SEQ ID NO: 1263 - DNA, 60 bp, synthetic construct
  source 1..60: mol_type = other DNA
gataagtaagtagggatgggacaggcttatgcggtattacgtggtggaggataagtaagt

SEQ ID NO: 1264 - DNA, 60 bp, synthetic construct
  source 1..60: mol_type = other DNA
ataagatagtgagatgggtggctcagtttttacccctgttgggtgggtgataagatagtg

SEQ ID NO: 1265 - DNA, 60 bp, synthetic construct
  source 1..60: mol_type = other DNA
ataagatagtgagatgggctgctccctcctggttaggttcccgtgggtgataagatagtg

SEQ ID NO: 1266 - DNA, 60 bp, synthetic construct
  source 1..60: mol_type = other DNA
ataagatagtgagatgggtgacgtggtcgcttctctttgaaagtgggtgataagatagtg

SEQ ID NO: 1267 - DNA, 61 bp, synthetic construct
  source 1..61: mol_type = other DNA
ataagatagtgagatgggtgtacctcagtttttacccctgatggtgggtgataagatagtg

SEQ ID NO: 1268 - DNA, 61 bp, synthetic construct
  source 1..61: mol_type = other DNA
ataagatagtgagatgggctgctccctcctggttaggttgccagtgggtgataagatagtg

SEQ ID NO: 1269 - DNA, 61 bp, synthetic construct
  source 1..61: mol_type = other DNA
ataagatagtgagatgggtgtgcctcagtttttacccctgatggtgggtgataagatagtg

SEQ ID NO: 1270 - DNA, 60 bp, synthetic construct
  source 1..60: mol_type = other DNA
ataagatagtgagatgggtgtacctcagtttttacccctcatgtgggtgataagatagtg

SEQ ID NO: 1271 - DNA, 61 bp, synthetic construct
  source 1..61: mol_type = other DNA
ataagatagtgagatgggtggactggttaggttgggtcacgccgtgggtgataagatagtg

SEQ ID NO: 1272 - DNA, 61 bp, synthetic construct
  source 1..61: mol_type = other DNA
gataagtaagtagggatgtggctcagtttttacccctgttggtggtggaggataagtaagt

SEQ ID NO: 1273 - DNA, 60 bp, synthetic construct
  source 1..60: mol_type = other DNA
gataagtaagtagggatgctgctccctcctggttaggttcccggtggaggataagtaagt

SEQ ID NO: 1274 - DNA, 60 bp, synthetic construct
  source 1..60: mol_type = other DNA
gataagtaagtagggatgtgacgtggtcgcttctctttgaaaggtggaggataagtaagt

SEQ ID NO: 1275 - DNA, 61 bp, synthetic construct
  source 1..61: mol_type = other DNA
gataagtaagtagggatgtgtacctcagtttttacccctgatgggtggaggataagtaagt

SEQ ID NO: 1276 - DNA, 61 bp, synthetic construct
  source 1..61: mol_type = other DNA
gataagtaagtagggatgctgctccctcctggttaggttgccaggtggaggataagtaagt

SEQ ID NO: 1277 - DNA, 60 bp, synthetic construct
  source 1..60: mol_type = other DNA
gataagtaagtagggatggtgcctcagtttttacccctgatgggtggaggataagtaagt

SEQ ID NO: 1278 - DNA, 60 bp, synthetic construct
  source 1..60: mol_type = other DNA
gataagtaagtagggatgtgtacctcagtttttacccctcatggtggaggataagtaagt

SEQ ID NO: 1279 - DNA, 60 bp, synthetic construct
  source 1..60: mol_type = other DNA
gataagtaagtagggatgggactggttaggttgggtcacgccggtggaggataagtaagt

SEQ ID NO: 1280 - DNA, 61 bp, synthetic construct
  source 1..61: mol_type = other DNA
ttaatatgggtagttgggtctgtcgaaaacacggtgaagaggtgggtgtgttaatatgggt

SEQ ID NO: 1281 - DNA, 61 bp, synthetic construct
  source 1..61: mol_type = other DNA
ttaatatgggtagttgggcagagtctggatgatcatcctgagtgggtgtgttaatatgggt

SEQ ID NO: 1282 - DNA, 61 bp, synthetic construct
  source 1..61: mol_type = other DNA
ttaatatgggtagttgggtattctcgcttataaaagcagtaatgggtgtgttaatatgggt

SEQ ID NO: 1283 - DNA, 64 bp, synthetic construct
  source 1..64: mol_type = other DNA
ttaatatgggtagttgggtcaagctaatagtctgaatggttgtcgtgggtgtgttaatatgggt

SEQ ID NO: 1284 - DNA, 62 bp, synthetic construct
  source 1..62: mol_type = other DNA
ttaatatgggtagttgggcagtacccaaaactgctagtatcgtagggtgtgttaatatgggt

SEQ ID NO: 1285 - DNA, 60 bp, synthetic construct
  source 1..60: mol_type = other DNA
ttaatatgggtagttgggatggaccaggaaacgtattcaggcgggtgtgttaatatgggt

SEQ ID NO: 1286 - DNA, 62 bp, synthetic construct
  source 1..62: mol_type = other DNA
ttaatatgggtagttgggcccgtcctaccagaaaaatccaagacgggtgtgttaatatgggt

SEQ ID NO: 1287 - DNA, 61 bp, synthetic construct
  source 1..61: mol_type = other DNA
ttaatatgggtagttgggtctgtcgaaaacacggtgaagcggagggtgtgttaatatgggt

SEQ ID NO: 1288 - DNA, 61 bp, synthetic construct
  source 1..61: mol_type = other DNA
gataagtaagtagggatgtctgtcgaaaacacggtgaagaggtggtggaggataagtaagt

SEQ ID NO: 1289 - DNA, 60 bp, synthetic construct
  source 1..60: mol_type = other DNA
gataagtaagtagggatgcagagtctggatgatcatcctgagggtggaggataagtaagt

SEQ ID NO: 1290 - DNA, 61 bp, synthetic construct
  source 1..61: mol_type = other DNA
gataagtaagtagggatgtattctcgcttataaaagcagtaatggtggaggataagtaagt

SEQ ID NO: 1291 - DNA, 63 bp, synthetic construct
  source 1..63: mol_type = other DNA
gataagtaagtagggatgtcaagctaatagtctgaatggttgtcgggtggaggataagtaagt

SEQ ID NO: 1292 - DNA, 62 bp, synthetic construct
  source 1..62: mol_type = other DNA
gataagtaagtagggatgcagtacccaaaactgctagtatcgtaggtggaggataagtaagt

SEQ ID NO: 1293 - DNA, 60 bp, synthetic construct
  source 1..60: mol_type = other DNA
gataagtaagtagggatgatggaccaggaaacgtattcaggcggtggaggataagtaagt

SEQ ID NO: 1294 - DNA, 62 bp, synthetic construct
  source 1..62: mol_type = other DNA
gataagtaagtagggatgcccgtcctaccagaaaaatccaagacggtggaggataagtaagt

SEQ ID NO: 1295 - DNA, 61 bp, synthetic construct
  source 1..61: mol_type = other DNA
gataagtaagtagggatgtctgtcgaaaacacggtgaagcggaggtggaggataagtaagt

SEQ ID NO: 1296 - DNA, 61 bp, synthetic construct
  source 1..61: mol_type = other DNA
ggtaattgagtagaagggtgagcgtcagtacaccgtccaggtcgggatgaggtaattgagt

SEQ ID NO: 1297 - DNA, 60 bp, synthetic construct
  source 1..60: mol_type = other DNA
ggtaattgagtagaagggacgatgctgccggcaggatgtgttgggatgaggtaattgagt

SEQ ID NO: 1298 - DNA, 61 bp, synthetic construct
  source 1..61: mol_type = other DNA
ggtaattgagtagaagggtgtgcagtcatcggatctgcctagcgggatgaggtaattgagt

SEQ ID NO: 1299 - DNA, 61 bp, synthetic construct
  source 1..61: mol_type = other DNA
ggtaattgagtagaagggaggtccgaaaaaattccgccccggagggatgaggtaattgagt

SEQ ID NO: 1300 - DNA, 61 bp, synthetic construct
  source 1..61: mol_type = other DNA
ggtaattgagtagaagggtggaccgaaaaaattccgccccggagggatgaggtaattgagt

SEQ ID NO: 1301 - DNA, 61 bp, synthetic construct
  source 1..61: mol_type = other DNA
ggtaattgagtagaagggtggtccgcaccgcatgcgctttggcgggatgaggtaattgagt

SEQ ID NO: 1302 - DNA, 60 bp, synthetic construct
  source 1..60: mol_type = other DNA
ggtaattgagtagaagggcgtgcatccctctgttaacgcgtagggatgaggtaattgagt

SEQ ID NO: 1303 - DNA, 61 bp, synthetic construct
  source 1..61: mol_type = other DNA
ggtaattgagtagaagggtatgaagtactccatcgctcagcgtgggatgaggtaattgagt

SEQ ID NO: 1304 - DNA, 60 bp, synthetic construct
  source 1..60: mol_type = other DNA
gataagtaagtagggatggagcgtcagtacaccgtccaggtcggtggaggataagtaagt

SEQ ID NO: 1305 - DNA, 60 bp, synthetic construct
  source 1..60: mol_type = other DNA
gataagtaagtagggatgacgatgctgccggcaggatgtgttggtggaggataagtaagt

SEQ ID NO: 1306 - DNA, 60 bp, synthetic construct
  source 1..60: mol_type = other DNA
gataagtaagtagggatggtgcagtcatcggatctgcctagcggtggaggataagtaagt

SEQ ID NO: 1307 - DNA, 61 bp, synthetic construct
  source 1..61: mol_type = other DNA
gataagtaagtagggatgaggtccgaaaaaattccgccccggaggtggaggataagtaagt

SEQ ID NO: 1308 - DNA, 60 bp, synthetic construct
  source 1..60: mol_type = other DNA
gataagtaagtagggatgggaccgaaaaaattccgccccggaggtggaggataagtaagt

SEQ ID NO: 1309 - DNA, 60 bp, synthetic construct
  source 1..60: mol_type = other DNA
gataagtaagtagggatgggtccgcaccgcatgcgctttggcggtggaggataagtaagt

SEQ ID NO: 1310 - DNA, 60 bp, synthetic construct
  source 1..60: mol_type = other DNA
gataagtaagtagggatgcgtgcatccctctgttaacgcgtaggtggaggataagtaagt

SEQ ID NO: 1311 - DNA, 60 bp, synthetic construct
  source 1..60: mol_type = other DNA
gataagtaagtagggatgtatgaagtactccatcgctcagcgggtggaggataagtaagt

SEQ ID NO: 1312 - DNA, 60 bp, synthetic construct
  source 1..60: mol_type = other DNA
gtaatagatatgagggtgggtcggcagcgcaggattatggcctgggagggtaatagatat

SEQ ID NO: 1313 - DNA, 60 bp, synthetic construct
  source 1..60: mol_type = other DNA
gtaatagatatgagggtgtacgcagcgcaggattatgcgcattgggagggtaatagatat

SEQ ID NO: 1314 - DNA, 60 bp, synthetic construct
  source 1..60: mol_type = other DNA
gtaatagatatgagggtgacgcagcgcaggattatgcggatatgggagggtaatagatat

SEQ ID NO: 1315 - DNA, 61 bp, synthetic construct
  source 1..61: mol_type = other DNA
gtaatagatatgagggtgggtcggcagcgcaggattatgcccatgggagggtaatagatat

SEQ ID NO: 1316 - DNA, 62 bp, synthetic construct
  source 1..62: mol_type = other DNA
gtaatagatatgagggtggtaggcagcgcaggattatgcggatatgggagggtaatagatat

SEQ ID NO: 1317 - DNA, 61 bp, synthetic construct
  source 1..61: mol_type = other DNA
gtaatagatatgagggtggtaggcagcgcaggattatgcgcattgggagggtaatagatat

SEQ ID NO: 1318 - DNA, 60 bp, synthetic construct
  source 1..60: mol_type = other DNA
gtaatagatatgagggtggtaggcagcgcaggattatgcccatgggagggtaatagatat

SEQ ID NO: 1319 - DNA, 61 bp, synthetic construct
  source 1..61: mol_type = other DNA
gtaatagatatgagggtgtacgcagcgcaggattatgcggatatgggagggtaatagatat

SEQ ID NO: 1320 - DNA, 61 bp, synthetic construct
  source 1..61: mol_type = other DNA
agtattattagggtgaggtggtcggcagcgcaggattatggccgggttggagtattattag

SEQ ID NO: 1321 - DNA, 60 bp, synthetic construct
  source 1..60: mol_type = other DNA
agtattattagggtgaggtacgcagcgcaggattatgcgcatgggttggagtattattag

SEQ ID NO: 1322 - DNA, 60 bp, synthetic construct
  source 1..60: mol_type = other DNA
agtattattagggtgaggacgcagcgcaggattatgcggatagggttggagtattattag

SEQ ID NO: 1323 - DNA, 62 bp, synthetic construct
  source 1..62: mol_type = other DNA
agtattattagggtgaggtggtcggcagcgcaggattatgcccagggttggagtattattag

SEQ ID NO: 1324 - DNA, 62 bp, synthetic construct
  source 1..62: mol_type = other DNA
agtattattagggtgagggtaggcagcgcaggattatgcggatagggttggagtattattag

SEQ ID NO: 1325 - DNA, 61 bp, synthetic construct
  source 1..61: mol_type = other DNA
agtattattagggtgagggtaggcagcgcaggattatgcgcatgggttggagtattattag

SEQ ID NO: 1326 - DNA, 60 bp, synthetic construct
  source 1..60: mol_type = other DNA
agtattattagggtgagggtaggcagcgcaggattatgcccagggttggagtattattag

SEQ ID NO: 1327 - DNA, 61 bp, synthetic construct
  source 1..61: mol_type = other DNA
agtattattagggtgaggtacgcagcgcaggattatgcggatagggttggagtattattag

SEQ ID NO: 1328 - DNA, 60 bp, synthetic construct
  source 1..60: mol_type = other DNA
ggaatttagtgagaagggagtacacccagtatcaactgcttagggtgttggaatttagtg

SEQ ID NO: 1329 - DNA, 60 bp, synthetic construct
  source 1..60: mol_type = other DNA
ggaatttagtgagaagggaccggttcagactctcgtccaaacgggtgttggaatttagtg

SEQ ID NO: 1330 - DNA, 61 bp, synthetic construct
  source 1..61: mol_type = other DNA
ggaatttagtgagaagggcagcacatcattcagttgcaaaagtgggtgttggaatttagtg

SEQ ID NO: 1331 - DNA, 62 bp, synthetic construct
  source 1..62: mol_type = other DNA
ggaatttagtgagaagggtctctttcgggattagcatcaccagtgggtgttggaatttagtg

SEQ ID NO: 1332 - DNA, 61 bp, synthetic construct
  source 1..61: mol_type = other DNA
ggaatttagtgagaagggtgggcggaagaactatgccatccccgggtgttggaatttagtg

SEQ ID NO: 1333 - DNA, 61 bp, synthetic construct
  source 1..61: mol_type = other DNA
ggaatttagtgagaagggtggtcggaagaactatgccatccccgggtgttggaatttagtg

SEQ ID NO: 1334 - DNA, 66 bp, synthetic construct
  source 1..66: mol_type = other DNA
ggaatttagtgagaagggactgaagttctttaatagttctaccaacgtgggtgttggaatttagtg

SEQ ID NO: 1335 - DNA, 65 bp, synthetic construct
  source 1..65: mol_type = other DNA
ggaatttagtgagaagggtggagttctttaatagttctaccatggccgggtgttggaatttagtg

SEQ ID NO: 1336 - DNA, 60 bp, synthetic construct
  source 1..60: mol_type = other DNA
agtattattagggtgaggagtacacccagtatcaactgcttagggttggagtattattag

SEQ ID NO: 1337 - DNA, 60 bp, synthetic construct
  source 1..60: mol_type = other DNA
agtattattagggtgaggaccggttcagactctcgtccaaacgggttggagtattattag

SEQ ID NO: 1338 - DNA, 61 bp, synthetic construct
  source 1..61: mol_type = other DNA
agtattattagggtgaggcagcacatcattcagttgcaaaagtgggttggagtattattag

SEQ ID NO: 1339 - DNA, 62 bp, synthetic construct
  source 1..62: mol_type = other DNA
agtattattagggtgaggtctctttcgggattagcatcaccagtgggttggagtattattag

SEQ ID NO: 1340 - DNA, 61 bp, synthetic construct
  source 1..61: mol_type = other DNA
agtattattagggtgaggtgggcggaagaactatgccatccccgggttggagtattattag

SEQ ID NO: 1341 - DNA, 61 bp, synthetic construct
  source 1..61: mol_type = other DNA
agtattattagggtgaggtggtcggaagaactatgccatccccgggttggagtattattag

SEQ ID NO: 1342 - DNA, 66 bp, synthetic construct
  source 1..66: mol_type = other DNA
agtattattagggtgaggactgaagttctttaatagttctaccaacgtgggttggagtattattag

SEQ ID NO: 1343 - DNA, 65 bp, synthetic construct
  source 1..65: mol_type = other DNA
agtattattagggtgaggtggagttctttaatagttctaccatggccgggttggagtattattag

SEQ ID NO: 1344 - DNA, 61 bp, synthetic construct
  source 1..61: mol_type = other DNA
ataagatagtgagatgggatcggagctttcttgcagggtaggcgtgggtgataagatagtg

SEQ ID NO: 1345 - DNA, 60 bp, synthetic construct
  source 1..60: mol_type = other DNA
ataagatagtgagatgggatcggagctttcttgcagggttgggtgggtgataagatagtg

SEQ ID NO: 1346 - DNA, 62 bp, synthetic construct
  source 1..62: mol_type = other DNA
ataagatagtgagatgggtcttcacattcaacttatcctccgcggtgggtgataagatagtg

SEQ ID NO: 1347 - DNA, 60 bp, synthetic construct
  source 1..60: mol_type = other DNA
ataagatagtgagatgggtgcagtcccattagagtgctcaacgtgggtgataagatagtg

SEQ ID NO: 1348 - DNA, 60 bp, synthetic construct
  source 1..60: mol_type = other DNA
ataagatagtgagatgggaatctattgacttcgggtgtttgggtgggtgataagatagtg

SEQ ID NO: 1349 - DNA, 60 bp, synthetic construct
  source 1..60: mol_type = other DNA
ataagatagtgagatgggtcggagctttcttgcagggtaggcgtgggtgataagatagtg

SEQ ID NO: 1350 - DNA, 61 bp, synthetic construct
  source 1..61: mol_type = other DNA
ataagatagtgagatgggtgcagtcccattagagtgctctacggtgggtgataagatagtg

SEQ ID NO: 1351 - DNA, 63 bp, synthetic construct
  source 1..63: mol_type = other DNA
ataagatagtgagatgggatcttcacattcaacttatcctccgcggtgggtgataagatagtg

SEQ ID NO: 1352 - DNA, 61 bp, synthetic construct
  source 1..61: mol_type = other DNA
agtattattagggtgaggatcggagctttcttgcagggtaggcgggttggagtattattag

SEQ ID NO: 1353 - DNA, 61 bp, synthetic construct
  source 1..61: mol_type = other DNA
agtattattagggtgaggatcggagctttcttgcagggttggtgggttggagtattattag

SEQ ID NO: 1354 - DNA, 63 bp, synthetic construct
  source 1..63: mol_type = other DNA
agtattattagggtgaggtcttcacattcaacttatcctccgcgtgggttggagtattattag

SEQ ID NO: 1355 - DNA, 60 bp, synthetic construct
  source 1..60: mol_type = other DNA
agtattattagggtgaggtgcagtcccattagagtgctcaacgggttggagtattattag

SEQ ID NO: 1356 - DNA, 61 bp, synthetic construct
  source 1..61: mol_type = other DNA
agtattattagggtgaggaatctattgacttcgggtgtttggtgggttggagtattattag

SEQ ID NO: 1357 - DNA, 60 bp, synthetic construct
  source 1..60: mol_type = other DNA
agtattattagggtgaggtcggagctttcttgcagggtaggcgggttggagtattattag

SEQ ID NO: 1358 - DNA, 62 bp, synthetic construct
  source 1..62: mol_type = other DNA
agtattattagggtgaggtgcagtcccattagagtgctctacgtgggttggagtattattag

SEQ ID NO: 1359 - DNA, 64 bp, synthetic construct
  source 1..64: mol_type = other DNA
agtattattagggtgaggatcttcacattcaacttatcctccgcgtgggttggagtattattag

SEQ ID NO: 1360 - DNA, 67 bp, synthetic construct
  source 1..67: mol_type = other DNA
ttaatatgggtagttgggtgaagtacaaacaggatgtcccatccgatgtgggtgtgttaatatgggt

SEQ ID NO: 1361 - DNA, 61 bp, synthetic construct
  source 1..61: mol_type = other DNA
ttaatatgggtagttgggtagtggtacaaacaggatgtccgtagggtgtgttaatatgggt

SEQ ID NO: 1362 - DNA, 60 bp, synthetic construct
  source 1..60: mol_type = other DNA
ttaatatgggtagttgggtagtggtacaaacaggatgtcggtgggtgtgttaatatgggt

SEQ ID NO: 1363 - DNA, 65 bp, synthetic construct
  source 1..65: mol_type = other DNA
ttaatatgggtagttgggaaatacaaacaggatgtcccatccgatgtgggtgtgttaatatgggt

SEQ ID NO: 1364 - DNA, 64 bp, synthetic construct
  source 1..64: mol_type = other DNA
ttaatatgggtagttgggaacacaaacaggatgtcccatccgatgtgggtgtgttaatatgggt

SEQ ID NO: 1365 - DNA, 61 bp, synthetic construct
  source 1..61: mol_type = other DNA
ttaatatgggtagttgggctaatctttggtacaaacaggaacagggtgtgttaatatgggt

SEQ ID NO: 1366 - DNA, 61 bp, synthetic construct
  source 1..61: mol_type = other DNA
ttaatatgggtagttgggtgaggagttgcagttttgagtggctgggtgtgttaatatgggt

SEQ ID NO: 1367 - DNA, 61 bp, synthetic construct
  source 1..61: mol_type = other DNA
ttaatatgggtagttgggtgaagagttgcagttttgagtggctgggtgtgttaatatgggt

SEQ ID NO: 1368 - DNA, 66 bp, synthetic construct
  source 1..66: mol_type = other DNA
agtattattagggtgagggaagtacaaacaggatgtcccatccgatgtgggttggagtattattag

SEQ ID NO: 1369 - DNA, 61 bp, synthetic construct
  source 1..61: mol_type = other DNA
agtattattagggtgaggtagtggtacaaacaggatgtccgtagggttggagtattattag

SEQ ID NO: 1370 - DNA, 60 bp, synthetic construct
  source 1..60: mol_type = other DNA
agtattattagggtgaggtagtggtacaaacaggatgtcggtgggttggagtattattag

SEQ ID NO: 1371 - DNA, 65 bp, synthetic construct
  source 1..65: mol_type = other DNA
agtattattagggtgaggaaatacaaacaggatgtcccatccgatgtgggttggagtattattag

SEQ ID NO: 1372 - DNA, 64 bp, synthetic construct
  source 1..64: mol_type = other DNA
agtattattagggtgaggaacacaaacaggatgtcccatccgatgtgggttggagtattattag

SEQ ID NO: 1373 - DNA, 61 bp, synthetic construct
  source 1..61: mol_type = other DNA
agtattattagggtgaggctaatctttggtacaaacaggaacagggttggagtattattag

SEQ ID NO: 1374 - DNA, 60 bp, synthetic construct
  source 1..60: mol_type = other DNA
agtattattagggtgagggaggagttgcagttttgagtggctgggttggagtattattag

SEQ ID NO: 1375 - DNA, 61 bp, synthetic construct
  source 1..61: mol_type = other DNA
agtattattagggtgaggtgaagagttgcagttttgagtggctgggttggagtattattag

SEQ ID NO: 1376 - DNA, 61 bp, synthetic construct
  source 1..61: mol_type = other DNA
ggaatttagtgagaagggtggaacttcactcaagaacagctcagggtgttggaatttagtg

SEQ ID NO: 1377 - DNA, 65 bp, synthetic construct
  source 1..65: mol_type = other DNA
ggaatttagtgagaagggcgatctctaagctcttcttgggatgtgttgggtgttggaatttagtg

SEQ ID NO: 1378 - DNA, 60 bp, synthetic construct
  source 1..60: mol_type = other DNA
ggaatttagtgagaagggcaactctgcttcgcagctttggaagggtgttggaatttagtg

SEQ ID NO: 1379 - DNA, 60 bp, synthetic construct
  source 1..60: mol_type = other DNA
ggaatttagtgagaagggtttggtcagccccccccacacgatgggtgttggaatttagtg

SEQ ID NO: 1380 - DNA, 60 bp, synthetic construct
  source 1..60: mol_type = other DNA
ggaatttagtgagaagggagcggcgccctcctaaaaggtatcgggtgttggaatttagtg

SEQ ID NO: 1381 - DNA, 60 bp, synthetic construct
  source 1..60: mol_type = other DNA
ggaatttagtgagaagggaatgtcccttaagacagaggtaatgggtgttggaatttagtg

SEQ ID NO: 1382 - DNA, 60 bp, synthetic construct
  source 1..60: mol_type = other DNA
ggaatttagtgagaagggccgttctacctctcagtacgggatgggtgttggaatttagtg

SEQ ID NO: 1383 - DNA, 61 bp, synthetic construct
  source 1..61: mol_type = other DNA
ggaatttagtgagaagggaggcactaacttgagagagcatcgtgggtgttggaatttagtg

SEQ ID NO: 1384 - DNA, 60 bp, synthetic construct
  source 1..60: mol_type = other DNA
atgtattaagaggagggaggaacttcactcaagaacagctcagaggaggatgtattaaga

SEQ ID NO: 1385 - DNA, 65 bp, synthetic construct
  source 1..65: mol_type = other DNA
atgtattaagaggagggacgatctctaagctcttcttgggatgtgttgaggaggatgtattaaga

SEQ ID NO: 1386 - DNA, 60 bp, synthetic construct
  source 1..60: mol_type = other DNA
atgtattaagaggagggacaactctgcttcgcagctttggaagaggaggatgtattaaga

SEQ ID NO: 1387 - DNA, 60 bp, synthetic construct
  source 1..60: mol_type = other DNA
atgtattaagaggagggatttggtcagccccccccacacgatgaggaggatgtattaaga

SEQ ID NO: 1388 - DNA, 60 bp, synthetic construct
  source 1..60: mol_type = other DNA
atgtattaagaggagggaagcggcgccctcctaaaaggtatcgaggaggatgtattaaga

SEQ ID NO: 1389 - DNA, 60 bp, synthetic construct
  source 1..60: mol_type = other DNA
atgtattaagaggagggaaatgtcccttaagacagaggtaatgaggaggatgtattaaga

SEQ ID NO: 1390 - DNA, 60 bp, synthetic construct
  source 1..60: mol_type = other DNA
atgtattaagaggagggaccgttctacctctcagtacgggatgaggaggatgtattaaga

SEQ ID NO: 1391 - DNA, 60 bp, synthetic construct
  source 1..60: mol_type = other DNA
atgtattaagaggagggaaggcactaacttgagagagcatcggaggaggatgtattaaga

SEQ ID NO: 1392 - DNA, 60 bp, synthetic construct
  source 1..60: mol_type = other DNA
ataagatagtgagatgggtgcgcattgctgggtaagagtaaggtgggtgataagatagtg

SEQ ID NO: 1393 - DNA, 65 bp, synthetic construct
  source 1..65: mol_type = other DNA
ataagatagtgagatgggtcactaacttaatattggcaactagtatagtgggtgataagatagtg

SEQ ID NO: 1394 - DNA, 63 bp, synthetic construct
  source 1..63: mol_type = other DNA
ataagatagtgagatgggtgaaaccgtattagcacaaatttcagagtgggtgataagatagtg

SEQ ID NO: 1395 - DNA, 63 bp, synthetic construct
  source 1..63: mol_type = other DNA
ataagatagtgagatgggcagataccgtattagcacaaatttgaggtgggtgataagatagtg

SEQ ID NO: 1396 - DNA, 61 bp, synthetic construct
  source 1..61: mol_type = other DNA
ataagatagtgagatgggtgcagcttcggcgcagaaggagagcgtgggtgataagatagtg

SEQ ID NO: 1397 - DNA, 60 bp, synthetic construct
  source 1..60: mol_type = other DNA
ataagatagtgagatgggaatttcggcgcagaaggagtcctagtgggtgataagatagtg

SEQ ID NO: 1398 - DNA, 61 bp, synthetic construct
  source 1..61: mol_type = other DNA
ataagatagtgagatgggtgcgcattgctgggtaagagttagggtgggtgataagatagtg

SEQ ID NO: 1399 - DNA, 61 bp, synthetic construct
  source 1..61: mol_type = other DNA
ataagatagtgagatgggatcattccactttcctctactggtggtgggtgataagatagtg

SEQ ID NO: 1400 - DNA, 60 bp, synthetic construct
  source 1..60: mol_type = other DNA
atgtattaagaggagggatgcgcattgctgggtaagagtaaggaggaggatgtattaaga

SEQ ID NO: 1401 - DNA, 65 bp, synthetic construct
  source 1..65: mol_type = other DNA
atgtattaagaggagggatcactaacttaatattggcaactagtatagaggaggatgtattaaga

SEQ ID NO: 1402 - DNA, 62 bp, synthetic construct
  source 1..62: mol_type = other DNA
atgtattaagaggagggagaaaccgtattagcacaaatttcagagaggaggatgtattaaga

SEQ ID NO: 1403 - DNA, 63 bp, synthetic construct
  source 1..63: mol_type = other DNA
atgtattaagaggagggacagataccgtattagcacaaatttgaggaggaggatgtattaaga

SEQ ID NO: 1404 - DNA, 60 bp, synthetic construct
  source 1..60: mol_type = other DNA
atgtattaagaggagggagcagcttcggcgcagaaggagagcgaggaggatgtattaaga

SEQ ID NO: 1405 - DNA, 60 bp, synthetic construct
  source 1..60: mol_type = other DNA
atgtattaagaggagggaaatttcggcgcagaaggagtcctagaggaggatgtattaaga

SEQ ID NO: 1406 - DNA, 60 bp, synthetic construct
  source 1..60: mol_type = other DNA
atgtattaagaggagggagcgcattgctgggtaagagttagggaggaggatgtattaaga

SEQ ID NO: 1407 - DNA, 61 bp, synthetic construct
  source 1..61: mol_type = other DNA
atgtattaagaggagggaatcattccactttcctctactggtggaggaggatgtattaaga

SEQ ID NO: 1408 - DNA, 63 bp, synthetic construct
  source 1..63: mol_type = other DNA
ttaatatgggtagttgggatctcaatttcttgacgttatccgagtgggtgtgttaatatgggt

SEQ ID NO: 1409 - DNA, 62 bp, synthetic construct
  source 1..62: mol_type = other DNA
ttaatatgggtagttgggcaattatgcggttcctgggttgtcgtgggtgtgttaatatgggt

SEQ ID NO: 1410 - DNA, 61 bp, synthetic construct
  source 1..61: mol_type = other DNA
ttaatatgggtagttgggcttaactccgctttacacggccacagggtgtgttaatatgggt

SEQ ID NO: 1411 - DNA, 60 bp, synthetic construct
  source 1..60: mol_type = other DNA
ttaatatgggtagttgggtgttagcgctcatcgtttacacgcgggtgtgttaatatgggt

SEQ ID NO: 1412 - DNA, 60 bp, synthetic construct
  source 1..60: mol_type = other DNA
ttaatatgggtagttgggtggcacttccttcttccctgcactgggtgtgttaatatgggt

SEQ ID NO: 1413 - DNA, 60 bp, synthetic construct
  source 1..60: mol_type = other DNA
ttaatatgggtagttgggtggcaattccttgccgacaccatcgggtgtgttaatatgggt

SEQ ID NO: 1414 - DNA, 60 bp, synthetic construct
  source 1..60: mol_type = other DNA
ttaatatgggtagttgggcaacttcactctgtttcagcctaagggtgtgttaatatgggt

SEQ ID NO: 1415 - DNA, 65 bp, synthetic construct
  source 1..65: mol_type = other DNA
ttaatatgggtagttgggaacgataaatcttttctctcgccacgtacgggtgtgttaatatgggt

SEQ ID NO: 1416 - DNA, 62 bp, synthetic construct
  source 1..62: mol_type = other DNA
atgtattaagaggagggaatctcaatttcttgacgttatccgaggaggaggatgtattaaga

SEQ ID NO: 1417 - DNA, 61 bp, synthetic construct
  source 1..61: mol_type = other DNA
atgtattaagaggagggacaattatgcggttcctgggttgtcggaggaggatgtattaaga

SEQ ID NO: 1418 - DNA, 61 bp, synthetic construct
  source 1..61: mol_type = other DNA
atgtattaagaggagggacttaactccgctttacacggccacagaggaggatgtattaaga

SEQ ID NO: 1419 - DNA, 60 bp, synthetic construct
  source 1..60: mol_type = other DNA
atgtattaagaggagggatgttagcgctcatcgtttacacgcgaggaggatgtattaaga

SEQ ID NO: 1420 - DNA, 60 bp, synthetic construct
  source 1..60: mol_type = other DNA
atgtattaagaggagggatggcacttccttcttccctgcactgaggaggatgtattaaga

SEQ ID NO: 1421 - DNA, 60 bp, synthetic construct
  source 1..60: mol_type = other DNA
atgtattaagaggagggatggcaattccttgccgacaccatcgaggaggatgtattaaga

SEQ ID NO: 1422 - DNA, 60 bp, synthetic construct
  source 1..60: mol_type = other DNA
atgtattaagaggagggacaacttcactctgtttcagcctaagaggaggatgtattaaga

SEQ ID NO: 1423 - DNA, 65 bp, synthetic construct
  source 1..65: mol_type = other DNA
atgtattaagaggagggaaacgataaatcttttctctcgccacgtacgaggaggatgtattaaga

SEQ ID NO: 1424 - DNA, 62 bp, synthetic construct
  source 1..62: mol_type = other DNA
ggtaattgagtagaagggcggtaaatcttttcacaccatgcgtagggatgaggtaattgagt

SEQ ID NO: 1425 - DNA, 60 bp, synthetic construct
  source 1..60: mol_type = other DNA
ggtaattgagtagaagggtgccccgaaggattgttttactacgggatgaggtaattgagt

SEQ ID NO: 1426 - DNA, 64 bp, synthetic construct
  source 1..64: mol_type = other DNA
ggtaattgagtagaagggtgacccgtaggaaaagacacattacacagggatgaggtaattgagt

SEQ ID NO: 1427 - DNA, 60 bp, synthetic construct
  source 1..60: mol_type = other DNA
ggtaattgagtagaagggcggacagctctgcttccctttcaagggatgaggtaattgagt

SEQ ID NO: 1428 - DNA, 61 bp, synthetic construct
  source 1..61: mol_type = other DNA
ggtaattgagtagaagggtggagagttatcctcggctgtcggagggatgaggtaattgagt

SEQ ID NO: 1429 - DNA, 63 bp, synthetic construct
  source 1..63: mol_type = other DNA
ggtaattgagtagaagggacgataaatcttttcacaccatgcgtagggatgaggtaattgagt

SEQ ID NO: 1430 - DNA, 62 bp, synthetic construct
  source 1..62: mol_type = other DNA
ggtaattgagtagaagggtgccccgaaggattgttttacaacgtgggatgaggtaattgagt

SEQ ID NO: 1431 - DNA, 62 bp, synthetic construct
  source 1..62: mol_type = other DNA
ggtaattgagtagaagggacacgtaggaaaagacacattacacagggatgaggtaattgagt

SEQ ID NO: 1432 - DNA, 62 bp, synthetic construct
  source 1..62: mol_type = other DNA
atgtattaagaggagggacggtaaatcttttcacaccatgcgtagaggaggatgtattaaga

SEQ ID NO: 1433 - DNA, 60 bp, synthetic construct
  source 1..60: mol_type = other DNA
atgtattaagaggagggatgccccgaaggattgttttactacgaggaggatgtattaaga

SEQ ID NO: 1434 - DNA, 63 bp, synthetic construct
  source 1..63: mol_type = other DNA
atgtattaagaggagggagacccgtaggaaaagacacattacacagaggaggatgtattaaga

SEQ ID NO: 1435 - DNA, 60 bp, synthetic construct
  source 1..60: mol_type = other DNA
atgtattaagaggagggacggacagctctgcttccctttcaagaggaggatgtattaaga

SEQ ID NO: 1436 - DNA, 60 bp, synthetic construct
  source 1..60: mol_type = other DNA
atgtattaagaggagggaggagagttatcctcggctgtcggagaggaggatgtattaaga

SEQ ID NO: 1437 - DNA, 63 bp, synthetic construct
  source 1..63: mol_type = other DNA
atgtattaagaggagggaacgataaatcttttcacaccatgcgtagaggaggatgtattaaga

SEQ ID NO: 1438 - DNA, 61 bp, synthetic construct
  source 1..61: mol_type = other DNA
atgtattaagaggagggatgccccgaaggattgttttacaacggaggaggatgtattaaga

SEQ ID NO: 1439 - DNA, 62 bp, synthetic construct
  source 1..62: mol_type = other DNA
atgtattaagaggagggaacacgtaggaaaagacacattacacagaggaggatgtattaaga

SEQ ID NO: 1440 - DNA, 60 bp, synthetic construct
  source 1..60: mol_type = other DNA
gtaatagatatgagggtgtttcatgcgacttagttgcatatatgggagggtaatagatat

SEQ ID NO: 1441 - DNA, 60 bp, synthetic construct
  source 1..60: mol_type = other DNA
gtaatagatatgagggtgtcgtgcgacttagttgcattaacgtgggagggtaatagatat

SEQ ID NO: 1442 - DNA, 60 bp, synthetic construct
  source 1..60: mol_type = other DNA
gtaatagatatgagggtggcgttttgcctctctttgttgtggtgggagggtaatagatat

SEQ ID NO: 1443 - DNA, 60 bp, synthetic construct
  source 1..60: mol_type = other DNA
gtaatagatatgagggtgttcatgcgacttagttgcatttactgggagggtaatagatat

SEQ ID NO: 1444 - DNA, 61 bp, synthetic construct
  source 1..61: mol_type = other DNA
gtaatagatatgagggtgagcgttttgcctctctttgttgtggtgggagggtaatagatat

SEQ ID NO: 1445 - DNA, 60 bp, synthetic construct
  source 1..60: mol_type = other DNA
gtaatagatatgagggtgagcgttttgcctctctttgttctgtgggagggtaatagatat

SEQ ID NO: 1446 - DNA, 60 bp, synthetic construct
  source 1..60: mol_type = other DNA
gtaatagatatgagggtggagggttttgcctctctttgtacttgggagggtaatagatat

SEQ ID NO: 1447 - DNA, 60 bp, synthetic construct
  source 1..60: mol_type = other DNA
gtaatagatatgagggtggttccatgcgacttagttgcaaattgggagggtaatagatat

SEQ ID NO: 1448 - DNA, 60 bp, synthetic construct
  source 1..60: mol_type = other DNA
tagaattagagagatgggtttcatgcgacttagttgcatataggtggagtagaattagag

SEQ ID NO: 1449 - DNA, 60 bp, synthetic construct
  source 1..60: mol_type = other DNA
tagaattagagagatgggtcgtgcgacttagttgcattaacgggtggagtagaattagag

SEQ ID NO: 1450 - DNA, 62 bp, synthetic construct
  source 1..62: mol_type = other DNA
tagaattagagagatgggtgcgttttgcctctctttgttgtggtggtggagtagaattagag

SEQ ID NO: 1451 - DNA, 60 bp, synthetic construct
  source 1..60: mol_type = other DNA
tagaattagagagatgggttcatgcgacttagttgcatttacggtggagtagaattagag

SEQ ID NO: 1452 - DNA, 62 bp, synthetic construct
  source 1..62: mol_type = other DNA
tagaattagagagatgggagcgttttgcctctctttgttgtggtggtggagtagaattagag

SEQ ID NO: 1453 - DNA, 60 bp, synthetic construct
  source 1..60: mol_type = other DNA
tagaattagagagatgggagcgttttgcctctctttgttctgggtggagtagaattagag

SEQ ID NO: 1454 - DNA, 61 bp, synthetic construct
  source 1..61: mol_type = other DNA
tagaattagagagatgggtgagggttttgcctctctttgtactggtggagtagaattagag

SEQ ID NO: 1455 - DNA, 61 bp, synthetic construct
  source 1..61: mol_type = other DNA
tagaattagagagatgggtgttccatgcgacttagttgcaaatggtggagtagaattagag

SEQ ID NO: 1456 - DNA, 66 bp, synthetic construct
  source 1..66: mol_type = other DNA
ggaatttagtgagaagggtggtagaataggaatcactaggtttctagtgggtgttggaatttagtg

SEQ ID NO: 1457 - DNA, 66 bp, synthetic construct
  source 1..66: mol_type = other DNA
ggaatttagtgagaagggcggtagaataggaatcactaggtttctagtgggtgttggaatttagtg

SEQ ID NO: 1458 - DNA, 66 bp, synthetic construct
  source 1..66: mol_type = other DNA
ggaatttagtgagaagggtggcactagaataggaatcactaggtaagtgggtgttggaatttagtg

SEQ ID NO: 1459 - DNA, 64 bp, synthetic construct
  source 1..64: mol_type = other DNA
ggaatttagtgagaagggtggcactagaataggaatcactaggaaagggtgttggaatttagtg

SEQ ID NO: 1460 - DNA, 62 bp, synthetic construct
  source 1..62: mol_type = other DNA
ggaatttagtgagaagggcagccactagaataggaatcacttccgggtgttggaatttagtg

SEQ ID NO: 1461 - DNA, 62 bp, synthetic construct
  source 1..62: mol_type = other DNA
ggaatttagtgagaagggtgcagccactagaataggaatcagatgggtgttggaatttagtg

SEQ ID NO: 1462 - DNA, 65 bp, synthetic construct
  source 1..65: mol_type = other DNA
ggaatttagtgagaagggtgcgctagaataggaatcactaggtaagtgggtgttggaatttagtg

SEQ ID NO: 1463 - DNA, 67 bp, synthetic construct
  source 1..67: mol_type = other DNA
ggaatttagtgagaagggtggtagaataggaatcactaggtttcaaggtgggtgttggaatttagtg

SEQ ID NO: 1464 - DNA, 65 bp, synthetic construct
  source 1..65: mol_type = other DNA
tagaattagagagatgggtggtagaataggaatcactaggtttctagggtggagtagaattagag

SEQ ID NO: 1465 - DNA, 65 bp, synthetic construct
  source 1..65: mol_type = other DNA
tagaattagagagatgggcggtagaataggaatcactaggtttctagggtggagtagaattagag

SEQ ID NO: 1466 - DNA, 65 bp, synthetic construct
  source 1..65: mol_type = other DNA
tagaattagagagatgggtggcactagaataggaatcactaggtaagggtggagtagaattagag

SEQ ID NO: 1467 - DNA, 64 bp, synthetic construct
  source 1..64: mol_type = other DNA
tagaattagagagatgggtggcactagaataggaatcactaggaaaggtggagtagaattagag

SEQ ID NO: 1468 - DNA, 62 bp, synthetic construct
  source 1..62: mol_type = other DNA
tagaattagagagatgggcagccactagaataggaatcacttccggtggagtagaattagag

SEQ ID NO: 1469 - DNA, 62 bp, synthetic construct
  source 1..62: mol_type = other DNA
tagaattagagagatgggtgcagccactagaataggaatcagatggtggagtagaattagag

SEQ ID NO: 1470 - DNA, 64 bp, synthetic construct
  source 1..64: mol_type = other DNA
tagaattagagagatgggtgcgctagaataggaatcactaggtaagggtggagtagaattagag

SEQ ID NO: 1471 - DNA, 67 bp, synthetic construct
  source 1..67: mol_type = other DNA
tagaattagagagatgggtggtagaataggaatcactaggtttcaaggtggtggagtagaattagag

SEQ ID NO: 1472 - DNA, 60 bp, synthetic construct
  source 1..60: mol_type = other DNA
ataagatagtgagatgggaggtaggaagggcgacattacagcgtgggtgataagatagtg

SEQ ID NO: 1473 - DNA, 61 bp, synthetic construct
  source 1..61: mol_type = other DNA
ataagatagtgagatgggtcaccaaagcagtccacaggttctcgtgggtgataagatagtg

SEQ ID NO: 1474 - DNA, 60 bp, synthetic construct
  source 1..60: mol_type = other DNA
ataagatagtgagatgggagtcaaatcacttctcctccccttgtgggtgataagatagtg

SEQ ID NO: 1475 - DNA, 60 bp, synthetic construct
  source 1..60: mol_type = other DNA
ataagatagtgagatgggcgactccggttagggttgggtgtggtgggtgataagatagtg

SEQ ID NO: 1476 - DNA, 60 bp, synthetic construct
  source 1..60: mol_type = other DNA
ataagatagtgagatgggcaccatccttgatgctggctagacgtgggtgataagatagtg

SEQ ID NO: 1477 - DNA, 60 bp, synthetic construct
  source 1..60: mol_type = other DNA
ataagatagtgagatgggcaacaaagcagtccacaggttctcgtgggtgataagatagtg

SEQ ID NO: 1478 - DNA, 60 bp, synthetic construct
  source 1..60: mol_type = other DNA
ataagatagtgagatgggaggcgctcagtcaaatcacttgaggtgggtgataagatagtg

SEQ ID NO: 1479 - DNA, 60 bp, synthetic construct
  source 1..60: mol_type = other DNA
ataagatagtgagatgggcaggtaggaagggcgacattagaggtgggtgataagatagtg

SEQ ID NO: 1480 - DNA, 60 bp, synthetic construct
  source 1..60: mol_type = other DNA
tagaattagagagatgggaggtaggaagggcgacattacagcggtggagtagaattagag

SEQ ID NO: 1481 - DNA, 61 bp, synthetic construct
  source 1..61: mol_type = other DNA
tagaattagagagatgggtcaccaaagcagtccacaggttctcggtggagtagaattagag

SEQ ID NO: 1482 - DNA, 60 bp, synthetic construct
  source 1..60: mol_type = other DNA
tagaattagagagatgggagtcaaatcacttctcctccccttggtggagtagaattagag

SEQ ID NO: 1483 - DNA, 60 bp, synthetic construct
  source 1..60: mol_type = other DNA
tagaattagagagatgggcgactccggttagggttgggtgtgggtggagtagaattagag

SEQ ID NO: 1484 - DNA, 60 bp, synthetic construct
  source 1..60: mol_type = other DNA
tagaattagagagatgggcaccatccttgatgctggctagacggtggagtagaattagag

SEQ ID NO: 1485 - DNA, 60 bp, synthetic construct
  source 1..60: mol_type = other DNA
tagaattagagagatgggcaacaaagcagtccacaggttctcggtggagtagaattagag

SEQ ID NO: 1486 - DNA, 60 bp, synthetic construct
  source 1..60: mol_type = other DNA
tagaattagagagatgggaggcgctcagtcaaatcacttgagggtggagtagaattagag

SEQ ID NO: 1487 - DNA, 60 bp, synthetic construct
  source 1..60: mol_type = other DNA
tagaattagagagatgggcaggtaggaagggcgacattagagggtggagtagaattagag

SEQ ID NO: 1488 - DNA, 61 bp, synthetic construct
  source 1..61: mol_type = other DNA
ttaatatgggtagttgggcaggcgacttcgtggtcttatggccgggtgtgttaatatgggt

SEQ ID NO: 1489 - DNA, 62 bp, synthetic construct
  source 1..62: mol_type = other DNA
ttaatatgggtagttgggtgcggagcttttaccccaaagtctacgggtgtgttaatatgggt

SEQ ID NO: 1490 - DNA, 62 bp, synthetic construct
  source 1..62: mol_type = other DNA
ttaatatgggtagttgggtggcggagcttttaccccaaagtgtagggtgtgttaatatgggt

SEQ ID NO: 1491 - DNA, 61 bp, synthetic construct
  source 1..61: mol_type = other DNA
ttaatatgggtagttgggtggaagtcatgcgacttcgtggagagggtgtgttaatatgggt

SEQ ID NO: 1492 - DNA, 62 bp, synthetic construct
  source 1..62: mol_type = other DNA
ttaatatgggtagttgggtggaaagtcatgcgacttcgtgcagtgggtgtgttaatatgggt

SEQ ID NO: 1493 - DNA, 61 bp, synthetic construct
  source 1..61: mol_type = other DNA
ttaatatgggtagttgggtgcggagcttttaccccaaagtgtagggtgtgttaatatgggt

SEQ ID NO: 1494 - DNA, 60 bp, synthetic construct
  source 1..60: mol_type = other DNA
ttaatatgggtagttgggagtcgacttcgtggtcttatggccgggtgtgttaatatgggt

SEQ ID NO: 1495 - DNA, 61 bp, synthetic construct
  source 1..61: mol_type = other DNA
ttaatatgggtagttgggtggcggagcttttaccccaaagagtgggtgtgttaatatgggt

SEQ ID NO: 1496 - DNA, 61 bp, synthetic construct
  source 1..61: mol_type = other DNA
tagaattagagagatgggcaggcgacttcgtggtcttatggccggtggagtagaattagag

SEQ ID NO: 1497 - DNA, 62 bp, synthetic construct
  source 1..62: mol_type = other DNA
tagaattagagagatgggtgcggagcttttaccccaaagtctacggtggagtagaattagag

SEQ ID NO: 1498 - DNA, 62 bp, synthetic construct
  source 1..62: mol_type = other DNA
tagaattagagagatgggtggcggagcttttaccccaaagtgtaggtggagtagaattagag

SEQ ID NO: 1499 - DNA, 61 bp, synthetic construct
  source 1..61: mol_type = other DNA
tagaattagagagatgggtggaagtcatgcgacttcgtggagaggtggagtagaattagag

SEQ ID NO: 1500 - DNA, 61 bp, synthetic construct
  source 1..61: mol_type = other DNA
tagaattagagagatgggtggaaagtcatgcgacttcgtgcagggtggagtagaattagag

SEQ ID NO: 1501 - DNA, 61 bp, synthetic construct
  source 1..61: mol_type = other DNA
tagaattagagagatgggtgcggagcttttaccccaaagtgtaggtggagtagaattagag

SEQ ID NO: 1502 - DNA, 60 bp, synthetic construct
  source 1..60: mol_type = other DNA
tagaattagagagatgggagtcgacttcgtggtcttatggccggtggagtagaattagag

SEQ ID NO: 1503 - DNA, 61 bp, synthetic construct
  source 1..61: mol_type = other DNA
tagaattagagagatgggtggcggagcttttaccccaaagagtggtggagtagaattagag

SEQ ID NO: 1504 - DNA, 61 bp, synthetic construct
  source 1..61: mol_type = other DNA
ggtaattgagtagaagggacagttacagtctagcaaccccggtgggatgaggtaattgagt

SEQ ID NO: 1505 - DNA, 62 bp, synthetic construct
  source 1..62: mol_type = other DNA
ggtaattgagtagaagggtgcacactaggaattccggttgaggtgggatgaggtaattgagt

SEQ ID NO: 1506 - DNA, 62 bp, synthetic construct
  source 1..62: mol_type = other DNA
ggtaattgagtagaagggcaaagtagtagttccaaggttgtcgtgggatgaggtaattgagt

SEQ ID NO: 1507 - DNA, 61 bp, synthetic construct
  source 1..61: mol_type = other DNA
ggtaattgagtagaagggacagttacagtctagcaacccgggagggatgaggtaattgagt

SEQ ID NO: 1508 - DNA, 61 bp, synthetic construct
  source 1..61: mol_type = other DNA
ggtaattgagtagaagggaacccttggagttacgctactttgtgggatgaggtaattgagt

SEQ ID NO: 1509 - DNA, 60 bp, synthetic construct
  source 1..60: mol_type = other DNA
ggtaattgagtagaagggcagttacagtctagcaacccgggagggatgaggtaattgagt

SEQ ID NO: 1510 - DNA, 61 bp, synthetic construct
  source 1..61: mol_type = other DNA
ggtaattgagtagaagggtggtgttgagccttggagttaccgagggatgaggtaattgagt

SEQ ID NO: 1511 - DNA, 64 bp, synthetic construct
  source 1..64: mol_type = other DNA
ggtaattgagtagaagggtgttgttttagtagtagttccaaggaacgggatgaggtaattgagt

SEQ ID NO: 1512 - DNA, 61 bp, synthetic construct
  source 1..61: mol_type = other DNA
tagaattagagagatgggacagttacagtctagcaaccccggtggtggagtagaattagag

SEQ ID NO: 1513 - DNA, 62 bp, synthetic construct
  source 1..62: mol_type = other DNA
tagaattagagagatgggtgcacactaggaattccggttgaggtggtggagtagaattagag

SEQ ID NO: 1514 - DNA, 61 bp, synthetic construct
  source 1..61: mol_type = other DNA
tagaattagagagatgggcaaagtagtagttccaaggttgtcgggtggagtagaattagag

SEQ ID NO: 1515 - DNA, 61 bp, synthetic construct
  source 1..61: mol_type = other DNA
tagaattagagagatgggacagttacagtctagcaacccgggaggtggagtagaattagag

SEQ ID NO: 1516 - DNA, 60 bp, synthetic construct
  source 1..60: mol_type = other DNA
tagaattagagagatgggaacccttggagttacgctactttgggtggagtagaattagag

SEQ ID NO: 1517 - DNA, 60 bp, synthetic construct
  source 1..60: mol_type = other DNA
tagaattagagagatgggcagttacagtctagcaacccgggaggtggagtagaattagag

SEQ ID NO: 1518 - DNA, 61 bp, synthetic construct
  source 1..61: mol_type = other DNA
tagaattagagagatgggtggtgttgagccttggagttaccgaggtggagtagaattagag

SEQ ID NO: 1519 - DNA, 64 bp, synthetic construct
  source 1..64: mol_type = other DNA
tagaattagagagatgggtgttgttttagtagtagttccaaggaacggtggagtagaattagag

SEQ ID NO: 1520 - DNA, 64 bp, synthetic construct
  source 1..64: mol_type = other DNA
tgtataggattagaagggcgacttgataggtacagtcttttttgaagggtgagtgtataggatt

SEQ ID NO: 1521 - DNA, 61 bp, synthetic construct
  source 1..61: mol_type = other DNA
tgtataggattagaagggtgtgactagttaatcaggcgcatccgggtgagtgtataggatt

SEQ ID NO: 1522 - DNA, 65 bp, synthetic construct
  source 1..65: mol_type = other DNA
tgtataggattagaagggtacccgaaatactatctactttcatactagggtgagtgtataggatt

SEQ ID NO: 1523 - DNA, 62 bp, synthetic construct
  source 1..62: mol_type = other DNA
tgtataggattagaagggaagttctctctgtaatagccattcatgggtgagtgtataggatt

SEQ ID NO: 1524 - DNA, 65 bp, synthetic construct
  source 1..65: mol_type = other DNA
tgtataggattagaagggtcgtcttgataggtacagtcttttttgaagggtgagtgtataggatt

SEQ ID NO: 1525 - DNA, 60 bp, synthetic construct
  source 1..60: mol_type = other DNA
tgtataggattagaagggcaagcttgaccttgcggtttccgagggtgagtgtataggatt

SEQ ID NO: 1526 - DNA, 60 bp, synthetic construct
  source 1..60: mol_type = other DNA
tgtataggattagaagggcgcaggccatctattagtggaaacgggtgagtgtataggatt

SEQ ID NO: 1527 - DNA, 61 bp, synthetic construct
  source 1..61: mol_type = other DNA
tgtataggattagaagggccgaaggccatctattagtggaaacgggtgagtgtataggatt

SEQ ID NO: 1528 - DNA, 64 bp, synthetic construct
  source 1..64: mol_type = other DNA
tatagttatggagaagggcgacttgataggtacagtcttttttgaaggaagggtatagttatgg

SEQ ID NO: 1529 - DNA, 61 bp, synthetic construct
  source 1..61: mol_type = other DNA
tatagttatggagaagggtgtgactagttaatcaggcgcatccggaagggtatagttatgg

SEQ ID NO: 1530 - DNA, 65 bp, synthetic construct
  source 1..65: mol_type = other DNA
tatagttatggagaagggtacccgaaatactatctactttcatactaggaagggtatagttatgg

SEQ ID NO: 1531 - DNA, 62 bp, synthetic construct
  source 1..62: mol_type = other DNA
tatagttatggagaagggaagttctctctgtaatagccattcatggaagggtatagttatgg

SEQ ID NO: 1532 - DNA, 65 bp, synthetic construct
  source 1..65: mol_type = other DNA
tatagttatggagaagggtcgtcttgataggtacagtcttttttgaaggaagggtatagttatgg

SEQ ID NO: 1533 - DNA, 60 bp, synthetic construct
  source 1..60: mol_type = other DNA
tatagttatggagaagggcaagcttgaccttgcggtttccgaggaagggtatagttatgg

SEQ ID NO: 1534 - DNA, 60 bp, synthetic construct
  source 1..60: mol_type = other DNA
tatagttatggagaagggcgcaggccatctattagtggaaacggaagggtatagttatgg

SEQ ID NO: 1535 - DNA, 61 bp, synthetic construct
  source 1..61: mol_type = other DNA
tatagttatggagaagggccgaaggccatctattagtggaaacggaagggtatagttatgg

SEQ ID NO: 1536 - DNA, 62 bp, synthetic construct
  source 1..62: mol_type = other DNA
atggaagtagtagaagggtaaacatctgacttgacagacccggtgggatgtatggaagtagt

SEQ ID NO: 1537 - DNA, 63 bp, synthetic construct
  source 1..63: mol_type = other DNA
atggaagtagtagaagggtggactctacaagactctagcctcggtgggatgtatggaagtagt

SEQ ID NO: 1538 - DNA, 61 bp, synthetic construct
  source 1..61: mol_type = other DNA
atggaagtagtagaagggataccctctgtcaggcagatcaggtgggatgtatggaagtagt

SEQ ID NO: 1539 - DNA, 60 bp, synthetic construct
  source 1..60: mol_type = other DNA
atggaagtagtagaagggtagcctctgtcaggcagatccggtgggatgtatggaagtagt

SEQ ID NO: 1540 - DNA, 60 bp, synthetic construct
  source 1..60: mol_type = other DNA
atggaagtagtagaagggccaatctgacagcgagaggccgctgggatgtatggaagtagt

SEQ ID NO: 1541 - DNA, 62 bp, synthetic construct
  source 1..62: mol_type = other DNA
atggaagtagtagaagggtgcaattgctgaggttattaaccagtgggatgtatggaagtagt

SEQ ID NO: 1542 - DNA, 61 bp, synthetic construct
  source 1..61: mol_type = other DNA
atggaagtagtagaagggtcgctcctcaagggaacaaccaggtgggatgtatggaagtagt

SEQ ID NO: 1543 - DNA, 60 bp, synthetic construct
  source 1..60: mol_type = other DNA
atggaagtagtagaagggtcctctctgccaaattccgtgctagggatgtatggaagtagt

SEQ ID NO: 1544 - DNA, 62 bp, synthetic construct
  source 1..62: mol_type = other DNA
tatagttatggagaagggtaaacatctgacttgacagacccggtggaagggtatagttatgg

SEQ ID NO: 1545 - DNA, 63 bp, synthetic construct
  source 1..63: mol_type = other DNA
tatagttatggagaagggtggactctacaagactctagcctcggtggaagggtatagttatgg

SEQ ID NO: 1546 - DNA, 61 bp, synthetic construct
  source 1..61: mol_type = other DNA
tatagttatggagaagggataccctctgtcaggcagatcaggtggaagggtatagttatgg

SEQ ID NO: 1547 - DNA, 60 bp, synthetic construct
  source 1..60: mol_type = other DNA
tatagttatggagaagggtagcctctgtcaggcagatccggtggaagggtatagttatgg

SEQ ID NO: 1548 - DNA, 60 bp, synthetic construct
  source 1..60: mol_type = other DNA
tatagttatggagaagggccaatctgacagcgagaggccgctggaagggtatagttatgg

SEQ ID NO: 1549 - DNA, 62 bp, synthetic construct
  source 1..62: mol_type = other DNA
tatagttatggagaagggtgcaattgctgaggttattaaccagtggaagggtatagttatgg

SEQ ID NO: 1550 - DNA, 61 bp, synthetic construct
  source 1..61: mol_type = other DNA
tatagttatggagaagggtcgctcctcaagggaacaaccaggtggaagggtatagttatgg

SEQ ID NO: 1551 - DNA, 60 bp, synthetic construct
  source 1..60: mol_type = other DNA
tatagttatggagaagggtcctctctgccaaattccgtgctaggaagggtatagttatgg

SEQ ID NO: 1552 - DNA, 62 bp, synthetic construct
  source 1..62: mol_type = other DNA
ggatagagtatagttgggttcctgacggctttacccatcatagtggatggaggatagagtat

SEQ ID NO: 1553 - DNA, 61 bp, synthetic construct
  source 1..61: mol_type = other DNA
ggatagagtatagttgggtcctgacggctttacccatcatagtggatggaggatagagtat

SEQ ID NO: 1554 - DNA, 60 bp, synthetic construct
  source 1..60: mol_type = other DNA
ggatagagtatagttgggaggaaggcctgacggctttacggtggatggaggatagagtat

SEQ ID NO: 1555 - DNA, 61 bp, synthetic construct
  source 1..61: mol_type = other DNA
ggatagagtatagttgggttcctgacggctttacccatcaaagggatggaggatagagtat

SEQ ID NO: 1556 - DNA, 60 bp, synthetic construct
  source 1..60: mol_type = other DNA
ggatagagtatagttgggccggacggctttacccatcatagtggatggaggatagagtat

SEQ ID NO: 1557 - DNA, 61 bp, synthetic construct
  source 1..61: mol_type = other DNA
ggatagagtatagttgggcaggaaggcctgacggctttaaggtggatggaggatagagtat

SEQ ID NO: 1558 - DNA, 60 bp, synthetic construct
  source 1..60: mol_type = other DNA
ggatagagtatagttgggttcctgacggctttacccatctaaggatggaggatagagtat

SEQ ID NO: 1559 - DNA, 60 bp, synthetic construct
  source 1..60: mol_type = other DNA
ggatagagtatagttgggtcctgacggctttacccatcaaagggatggaggatagagtat

SEQ ID NO: 1560 - DNA, 62 bp, synthetic construct
  source 1..62: mol_type = other DNA
tatagttatggagaagggttcctgacggctttacccatcatagtggaagggtatagttatgg

SEQ ID NO: 1561 - DNA, 61 bp, synthetic construct
  source 1..61: mol_type = other DNA
tatagttatggagaagggtcctgacggctttacccatcatagtggaagggtatagttatgg

SEQ ID NO: 1562 - DNA, 60 bp, synthetic construct
  source 1..60: mol_type = other DNA
tatagttatggagaagggaggaaggcctgacggctttacggtggaagggtatagttatgg

SEQ ID NO: 1563 - DNA, 61 bp, synthetic construct
  source 1..61: mol_type = other DNA
tatagttatggagaagggttcctgacggctttacccatcaaagggaagggtatagttatgg

SEQ ID NO: 1564 - DNA, 60 bp, synthetic construct
  source 1..60: mol_type = other DNA
tatagttatggagaagggccggacggctttacccatcatagtggaagggtatagttatgg

SEQ ID NO: 1565 - DNA, 61 bp, synthetic construct
  source 1..61: mol_type = other DNA
tatagttatggagaagggcaggaaggcctgacggctttaaggtggaagggtatagttatgg

SEQ ID NO: 1566 - DNA, 60 bp, synthetic construct
  source 1..60: mol_type = other DNA
tatagttatggagaagggttcctgacggctttacccatctaaggaagggtatagttatgg

SEQ ID NO: 1567 - DNA, 60 bp, synthetic construct
  source 1..60: mol_type = other DNA
tatagttatggagaagggtcctgacggctttacccatcaaagggaagggtatagttatgg

SEQ ID NO: 1568 - DNA, 60 bp, synthetic construct
  source 1..60: mol_type = other DNA
aatgatatgttgagtgggagccctgtccacagaggtttagttgtggtggaatgatatgtt

SEQ ID NO: 1569 - DNA, 60 bp, synthetic construct
  source 1..60: mol_type = other DNA
aatgatatgttgagtgggaggcactgttcgagtggaacatcagtggtggaatgatatgtt

SEQ ID NO: 1570 - DNA, 65 bp, synthetic construct
  source 1..65: mol_type = other DNA
aatgatatgttgagtgggtcgatttctcctttgataacagaatctacgtggtggaatgatatgtt

SEQ ID NO: 1571 - DNA, 60 bp, synthetic construct
  source 1..60: mol_type = other DNA
aatgatatgttgagtgggtggtcttcgtgtctccgaagactcgtggtggaatgatatgtt

SEQ ID NO: 1572 - DNA, 60 bp, synthetic construct
  source 1..60: mol_type = other DNA
aatgatatgttgagtgggaggcacggaagggttcatcccagggtggtggaatgatatgtt

SEQ ID NO: 1573 - DNA, 63 bp, synthetic construct
  source 1..63: mol_type = other DNA
aatgatatgttgagtgggaggcactgttcgagtggaacaagtagggtggtggaatgatatgtt

SEQ ID NO: 1574 - DNA, 60 bp, synthetic construct
  source 1..60: mol_type = other DNA
aatgatatgttgagtgggtaaccgtagtatgctgacctagctgtggtggaatgatatgtt

SEQ ID NO: 1575 - DNA, 60 bp, synthetic construct
  source 1..60: mol_type = other DNA
aatgatatgttgagtgggtttcagtttcaaaagcaggtttacgtggtggaatgatatgtt

SEQ ID NO: 1576 - DNA, 60 bp, synthetic construct
  source 1..60: mol_type = other DNA
gataagtaagtagggatgagccctgtccacagaggtttagttggtggaggataagtaagt

SEQ ID NO: 1577 - DNA, 60 bp, synthetic construct
  source 1..60: mol_type = other DNA
gataagtaagtagggatgaggcactgttcgagtggaacatcaggtggaggataagtaagt

SEQ ID NO: 1578 - DNA, 65 bp, synthetic construct
  source 1..65: mol_type = other DNA
gataagtaagtagggatgtcgatttctcctttgataacagaatctacggtggaggataagtaagt

SEQ ID NO: 1579 - DNA, 60 bp, synthetic construct
  source 1..60: mol_type = other DNA
gataagtaagtagggatgtggtcttcgtgtctccgaagactcggtggaggataagtaagt

SEQ ID NO: 1580 - DNA, 61 bp, synthetic construct
  source 1..61: mol_type = other DNA
gataagtaagtagggatgaggcacggaagggttcatcccaggtggtggaggataagtaagt

SEQ ID NO: 1581 - DNA, 64 bp, synthetic construct
  source 1..64: mol_type = other DNA
gataagtaagtagggatgaggcactgttcgagtggaacaagtaggtggtggaggataagtaagt

SEQ ID NO: 1582 - DNA, 60 bp, synthetic construct
  source 1..60: mol_type = other DNA
gataagtaagtagggatgtaaccgtagtatgctgacctagctggtggaggataagtaagt

SEQ ID NO: 1583 - DNA, 60 bp, synthetic construct
  source 1..60: mol_type = other DNA
gataagtaagtagggatgtttcagtttcaaaagcaggtttacggtggaggataagtaagt

SEQ ID NO: 1584 - DNA, 61 bp, synthetic construct
  source 1..61: mol_type = other DNA
atggaagtagtagaagggacgtggtccgtagacattatgcccagggatgtatggaagtagt

SEQ ID NO: 1585 - DNA, 61 bp, synthetic construct
  source 1..61: mol_type = other DNA
atggaagtagtagaagggtacttcatccgatagtgcaagcagtgggatgtatggaagtagt

SEQ ID NO: 1586 - DNA, 62 bp, synthetic construct
  source 1..62: mol_type = other DNA
atggaagtagtagaagggatgccctaaggccttcttcatagtgtgggatgtatggaagtagt

SEQ ID NO: 1587 - DNA, 61 bp, synthetic construct
  source 1..61: mol_type = other DNA
atggaagtagtagaagggaaacatctgacttaattgaccgggagggatgtatggaagtagt

SEQ ID NO: 1588 - DNA, 65 bp, synthetic construct
  source 1..65: mol_type = other DNA
atggaagtagtagaagggtgcccaagaccacaacctctaaatcctgtgggatgtatggaagtagt

SEQ ID NO: 1589 - DNA, 63 bp, synthetic construct
  source 1..63: mol_type = other DNA
atggaagtagtagaagggtgagctatctctaaaggattcgctcctgggatgtatggaagtagt

SEQ ID NO: 1590 - DNA, 61 bp, synthetic construct
  source 1..61: mol_type = other DNA
atggaagtagtagaagggcgttgtctcagcgttcccgaaccgtgggatgtatggaagtagt

SEQ ID NO: 1591 - DNA, 63 bp, synthetic construct
  source 1..63: mol_type = other DNA
atggaagtagtagaagggtgcctacgacagactttatgagttggcgggatgtatggaagtagt

SEQ ID NO: 1592 - DNA, 61 bp, synthetic construct
  source 1..61: mol_type = other DNA
gataagtaagtagggatgacgtggtccgtagacattatgcccaggtggaggataagtaagt

SEQ ID NO: 1593 - DNA, 60 bp, synthetic construct
  source 1..60: mol_type = other DNA
gataagtaagtagggatgtacttcatccgatagtgcaagcagggtggaggataagtaagt

SEQ ID NO: 1594 - DNA, 61 bp, synthetic construct
  source 1..61: mol_type = other DNA
gataagtaagtagggatgatgccctaaggccttcttcatagtgggtggaggataagtaagt

SEQ ID NO: 1595 - DNA, 61 bp, synthetic construct
  source 1..61: mol_type = other DNA
gataagtaagtagggatgaaacatctgacttaattgaccgggaggtggaggataagtaagt

SEQ ID NO: 1596 - DNA, 63 bp, synthetic construct
  source 1..63: mol_type = other DNA
gataagtaagtagggatggcccaagaccacaacctctaaatcctgggtggaggataagtaagt

SEQ ID NO: 1597 - DNA, 62 bp, synthetic construct
  source 1..62: mol_type = other DNA
gataagtaagtagggatggagctatctctaaaggattcgctcctggtggaggataagtaagt

SEQ ID NO: 1598 - DNA, 60 bp, synthetic construct
  source 1..60: mol_type = other DNA
gataagtaagtagggatgcgttgtctcagcgttcccgaaccgggtggaggataagtaagt

SEQ ID NO: 1599 - DNA, 62 bp, synthetic construct
  source 1..62: mol_type = other DNA
gataagtaagtagggatggcctacgacagactttatgagttggcggtggaggataagtaagt

SEQ ID NO: 1600 - DNA, 61 bp, synthetic construct
  source 1..61: mol_type = other DNA
ggatagagtatagttgggtggaagggaacagggcgttgccggaggatggaggatagagtat

SEQ ID NO: 1601 - DNA, 62 bp, synthetic construct
  source 1..62: mol_type = other DNA
ggatagagtatagttgggtggaaagggaacagggcgttgcaggtggatggaggatagagtat

SEQ ID NO: 1602 - DNA, 61 bp, synthetic construct
  source 1..61: mol_type = other DNA
ggatagagtatagttgggcgagaagggaacagggcgttgaggtggatggaggatagagtat

SEQ ID NO: 1603 - DNA, 60 bp, synthetic construct
  source 1..60: mol_type = other DNA
ggatagagtatagttgggttcaacagggcgttgcccctggcaggatggaggatagagtat

SEQ ID NO: 1604 - DNA, 62 bp, synthetic construct
  source 1..62: mol_type = other DNA
ggatagagtatagttgggtgcgcgaagggaacagggcgttcggtggatggaggatagagtat

SEQ ID NO: 1605 - DNA, 60 bp, synthetic construct
  source 1..60: mol_type = other DNA
ggatagagtatagttgggcttgaacagggcgttgcccctcgcggatggaggatagagtat

SEQ ID NO: 1606 - DNA, 63 bp, synthetic construct
  source 1..63: mol_type = other DNA
ggatagagtatagttgggtgcacgaagggaacagggcgttgaggtggatggaggatagagtat

SEQ ID NO: 1607 - DNA, 62 bp, synthetic construct
  source 1..62: mol_type = other DNA
ggatagagtatagttgggcgggaagggaacagggcgttgcaggtggatggaggatagagtat

SEQ ID NO: 1608 - DNA, 60 bp, synthetic construct
  source 1..60: mol_type = other DNA
gataagtaagtagggatgggaagggaacagggcgttgccggaggtggaggataagtaagt

SEQ ID NO: 1609 - DNA, 61 bp, synthetic construct
  source 1..61: mol_type = other DNA
gataagtaagtagggatgggaaagggaacagggcgttgcaggtggtggaggataagtaagt

SEQ ID NO: 1610 - DNA, 61 bp, synthetic construct
  source 1..61: mol_type = other DNA
gataagtaagtagggatgcgagaagggaacagggcgttgaggtggtggaggataagtaagt

SEQ ID NO: 1611 - DNA, 60 bp, synthetic construct
  source 1..60: mol_type = other DNA
gataagtaagtagggatgttcaacagggcgttgcccctggcaggtggaggataagtaagt

SEQ ID NO: 1612 - DNA, 61 bp, synthetic construct
  source 1..61: mol_type = other DNA
gataagtaagtagggatggcgcgaagggaacagggcgttcggtggtggaggataagtaagt

SEQ ID NO: 1613 - DNA, 60 bp, synthetic construct
  source 1..60: mol_type = other DNA
gataagtaagtagggatgcttgaacagggcgttgcccctcgcggtggaggataagtaagt

SEQ ID NO: 1614 - DNA, 62 bp, synthetic construct
  source 1..62: mol_type = other DNA
gataagtaagtagggatggcacgaagggaacagggcgttgaggtggtggaggataagtaagt

SEQ ID NO: 1615 - DNA, 62 bp, synthetic construct
  source 1..62: mol_type = other DNA
gataagtaagtagggatgcgggaagggaacagggcgttgcaggtggtggaggataagtaagt

SEQ ID NO: 1616 - DNA, 60 bp, synthetic construct
  source 1..60: mol_type = other DNA
tgtaatagtaaggagggagaagaccgtaatcttcccttcacagggtgagtgtaatagtaa

SEQ ID NO: 1617 - DNA, 60 bp, synthetic construct
  source 1..60: mol_type = other DNA
tgtaatagtaaggagggatctttccgaccgtaatcttccgaagggtgagtgtaatagtaa

SEQ ID NO: 1618 - DNA, 60 bp, synthetic construct
  source 1..60: mol_type = other DNA
tgtaatagtaaggagggatgatgcacagatcttccgacccatgggtgagtgtaatagtaa

SEQ ID NO: 1619 - DNA, 61 bp, synthetic construct
  source 1..61: mol_type = other DNA
tgtaatagtaaggagggaagacgaccgtaatcttcccttcacagggtgagtgtaatagtaa

SEQ ID NO: 1620 - DNA, 61 bp, synthetic construct
  source 1..61: mol_type = other DNA
tgtaatagtaaggagggaattttcccttctgtacacccgtagcgggtgagtgtaatagtaa

SEQ ID NO: 1621 - DNA, 61 bp, synthetic construct
  source 1..61: mol_type = other DNA
tgtaatagtaaggagggagtgatgcacagatcttccgacccatgggtgagtgtaatagtaa

SEQ ID NO: 1622 - DNA, 61 bp, synthetic construct
  source 1..61: mol_type = other DNA
tgtaatagtaaggagggagtccttccgaccgtaatcttccgaagggtgagtgtaatagtaa

SEQ ID NO: 1623 - DNA, 61 bp, synthetic construct
  source 1..61: mol_type = other DNA
tgtaatagtaaggagggaattttcccttctgtacacccgaagtgggtgagtgtaatagtaa

SEQ ID NO: 1624 - DNA, 60 bp, synthetic construct
  source 1..60: mol_type = other DNA
gataagtaagtagggatggaagaccgtaatcttcccttcacaggtggaggataagtaagt

SEQ ID NO: 1625 - DNA, 60 bp, synthetic construct
  source 1..60: mol_type = other DNA
gataagtaagtagggatgtctttccgaccgtaatcttccgaaggtggaggataagtaagt

SEQ ID NO: 1626 - DNA, 60 bp, synthetic construct
  source 1..60: mol_type = other DNA
gataagtaagtagggatgtgatgcacagatcttccgacccatggtggaggataagtaagt

SEQ ID NO: 1627 - DNA, 61 bp, synthetic construct
  source 1..61: mol_type = other DNA
gataagtaagtagggatgagacgaccgtaatcttcccttcacaggtggaggataagtaagt

SEQ ID NO: 1628 - DNA, 61 bp, synthetic construct
  source 1..61: mol_type = other DNA
gataagtaagtagggatgattttcccttctgtacacccgtagcggtggaggataagtaagt

SEQ ID NO: 1629 - DNA, 61 bp, synthetic construct
  source 1..61: mol_type = other DNA
gataagtaagtagggatggtgatgcacagatcttccgacccatggtggaggataagtaagt

SEQ ID NO: 1630 - DNA, 61 bp, synthetic construct
  source 1..61: mol_type = other DNA
gataagtaagtagggatggtccttccgaccgtaatcttccgaaggtggaggataagtaagt

SEQ ID NO: 1631 - DNA, 60 bp, synthetic construct
  source 1..60: mol_type = other DNA
gataagtaagtagggatgattttcccttctgtacacccgaagggtggaggataagtaagt

SEQ ID NO: 1632 - DNA, 60 bp, synthetic construct
  source 1..60: mol_type = other DNA
aatgatatgttgagtgggcgtctgtttcctgttaccgttgctgtggtggaatgatatgtt

SEQ ID NO: 1633 - DNA, 60 bp, synthetic construct
  source 1..60: mol_type = other DNA
aatgatatgttgagtgggcggtcgtcagcgaaacagcaacgagtggtggaatgatatgtt

SEQ ID NO: 1634 - DNA, 61 bp, synthetic construct
  source 1..61: mol_type = other DNA
aatgatatgttgagtgggtgtcaaacagcaagctgtttccacagtggtggaatgatatgtt

SEQ ID NO: 1635 - DNA, 60 bp, synthetic construct
  source 1..60: mol_type = other DNA
aatgatatgttgagtgggttgcaagctgtttcctgttacgcagtggtggaatgatatgtt

SEQ ID NO: 1636 - DNA, 60 bp, synthetic construct
  source 1..60: mol_type = other DNA
aatgatatgttgagtgggagtgaaacagcaagctgtttcgacgtggtggaatgatatgtt

SEQ ID NO: 1637 - DNA, 60 bp, synthetic construct
  source 1..60: mol_type = other DNA
aatgatatgttgagtgggtgtaagctgtttcctgttacccaagtggtggaatgatatgtt

SEQ ID NO: 1638 - DNA, 61 bp, synthetic construct
  source 1..61: mol_type = other DNA
aatgatatgttgagtgggcgtctgtttcctgttaccgttcctggtggtggaatgatatgtt

SEQ ID NO: 1639 - DNA, 61 bp, synthetic construct
  source 1..61: mol_type = other DNA
aatgatatgttgagtgggtggtcgtcagcgaaacagcaaggacgtggtggaatgatatgtt

SEQ ID NO: 1640 - DNA, 60 bp, synthetic construct
  source 1..60: mol_type = other DNA
agtattattagggtgaggcgtctgtttcctgttaccgttgctgggttggagtattattag

SEQ ID NO: 1641 - DNA, 60 bp, synthetic construct
  source 1..60: mol_type = other DNA
agtattattagggtgaggcggtcgtcagcgaaacagcaacgagggttggagtattattag

SEQ ID NO: 1642 - DNA, 60 bp, synthetic construct
  source 1..60: mol_type = other DNA
agtattattagggtgagggtcaaacagcaagctgtttccacagggttggagtattattag

SEQ ID NO: 1643 - DNA, 60 bp, synthetic construct
  source 1..60: mol_type = other DNA
agtattattagggtgaggttgcaagctgtttcctgttacgcagggttggagtattattag

SEQ ID NO: 1644 - DNA, 60 bp, synthetic construct
  source 1..60: mol_type = other DNA
agtattattagggtgaggagtgaaacagcaagctgtttcgacgggttggagtattattag

SEQ ID NO: 1645 - DNA, 60 bp, synthetic construct
  source 1..60: mol_type = other DNA
agtattattagggtgaggtgtaagctgtttcctgttacccaagggttggagtattattag

SEQ ID NO: 1646 - DNA, 62 bp, synthetic construct
  source 1..62: mol_type = other DNA
agtattattagggtgaggcgtctgtttcctgttaccgttcctgtgggttggagtattattag

SEQ ID NO: 1647 - DNA, 61 bp, synthetic construct
  source 1..61: mol_type = other DNA
agtattattagggtgaggtggtcgtcagcgaaacagcaaggacgggttggagtattattag

SEQ ID NO: 1648 - DNA, 60 bp, synthetic construct
  source 1..60: mol_type = other DNA
tgtataggattagaagggagacatactctagctcgtcagaaagggtgagtgtataggatt

SEQ ID NO: 1649 - DNA, 66 bp, synthetic construct
  source 1..66: mol_type = other DNA
tgtataggattagaagggtttgcaaagtattaatttactgccctaggtgggtgagtgtataggatt

SEQ ID NO: 1650 - DNA, 66 bp, synthetic construct
  source 1..66: mol_type = other DNA
tgtataggattagaagggtttagcaaagtattaatttactgcccaagtgggtgagtgtataggatt

SEQ ID NO: 1651 - DNA, 61 bp, synthetic construct
  source 1..61: mol_type = other DNA
tgtataggattagaagggatgtagctcgtcagttttgaaacgtgggtgagtgtataggatt

SEQ ID NO: 1652 - DNA, 64 bp, synthetic construct
  source 1..64: mol_type = other DNA
tgtataggattagaagggtttagcaaagtattaatttactgccgaagggtgagtgtataggatt

SEQ ID NO: 1653 - DNA, 61 bp, synthetic construct
  source 1..61: mol_type = other DNA
tgtataggattagaagggatgtagctcgtcagttttgaatcgtgggtgagtgtataggatt

SEQ ID NO: 1654 - DNA, 65 bp, synthetic construct
  source 1..65: mol_type = other DNA
tgtataggattagaagggtttgcaaagtattaatttactgcccaagtgggtgagtgtataggatt

SEQ ID NO: 1655 - DNA, 60 bp, synthetic construct
  source 1..60: mol_type = other DNA
tgtataggattagaagggtgaagctcgtcagttttgaatcgtgggtgagtgtataggatt

SEQ ID NO: 1656 - DNA, 60 bp, synthetic construct
  source 1..60: mol_type = other DNA
agtattattagggtgaggagacatactctagctcgtcagaaagggttggagtattattag

SEQ ID NO: 1657 - DNA, 66 bp, synthetic construct
  source 1..66: mol_type = other DNA
agtattattagggtgaggtttgcaaagtattaatttactgccctaggtgggttggagtattattag

SEQ ID NO: 1658 - DNA, 66 bp, synthetic construct
  source 1..66: mol_type = other DNA
agtattattagggtgaggtttagcaaagtattaatttactgcccaagtgggttggagtattattag

SEQ ID NO: 1659 - DNA, 61 bp, synthetic construct
  source 1..61: mol_type = other DNA
agtattattagggtgaggatgtagctcgtcagttttgaaacgtgggttggagtattattag

SEQ ID NO: 1660 - DNA, 64 bp, synthetic construct
  source 1..64: mol_type = other DNA
agtattattagggtgaggtttagcaaagtattaatttactgccgaagggttggagtattattag

SEQ ID NO: 1661 - DNA, 61 bp, synthetic construct
  source 1..61: mol_type = other DNA
agtattattagggtgaggatgtagctcgtcagttttgaatcgtgggttggagtattattag

SEQ ID NO: 1662 - DNA, 65 bp, synthetic construct
  source 1..65: mol_type = other DNA
agtattattagggtgaggtttgcaaagtattaatttactgcccaagtgggttggagtattattag

SEQ ID NO: 1663 - DNA, 60 bp, synthetic construct
  source 1..60: mol_type = other DNA
agtattattagggtgaggtgaagctcgtcagttttgaatcgtgggttggagtattattag

SEQ ID NO: 1664 - DNA, 62 bp, synthetic construct
  source 1..62: mol_type = other DNA
ggatagagtatagttgggtgcagccagtaaactggcagaaaggtggatggaggatagagtat

SEQ ID NO: 1665 - DNA, 61 bp, synthetic construct
  source 1..61: mol_type = other DNA
ggatagagtatagttgggtgtgtagacaactgcctcccttcgcggatggaggatagagtat

SEQ ID NO: 1666 - DNA, 60 bp, synthetic construct
  source 1..60: mol_type = other DNA
ggatagagtatagttgggtgcctggcaactggacgtaggccaggatggaggatagagtat

SEQ ID NO: 1667 - DNA, 60 bp, synthetic construct
  source 1..60: mol_type = other DNA
ggatagagtatagttgggagatcccgttcgctacccacggaaggatggaggatagagtat

SEQ ID NO: 1668 - DNA, 60 bp, synthetic construct
  source 1..60: mol_type = other DNA
ggatagagtatagttgggtcggagcattgttaagaggccagaggatggaggatagagtat

SEQ ID NO: 1669 - DNA, 65 bp, synthetic construct
  source 1..65: mol_type = other DNA
ggatagagtatagttgggtggcactaacctttcctaatttccacggcggatggaggatagagtat

SEQ ID NO: 1670 - DNA, 61 bp, synthetic construct
  source 1..61: mol_type = other DNA
ggatagagtatagttgggtgtggacttaagcgcccacctagcgggatggaggatagagtat

SEQ ID NO: 1671 - DNA, 65 bp, synthetic construct
  source 1..65: mol_type = other DNA
ggatagagtatagttgggccacgtcatacacaaaactattcgcaaacggatggaggatagagtat

SEQ ID NO: 1672 - DNA, 61 bp, synthetic construct
  source 1..61: mol_type = other DNA
agtattattagggtgagggcagccagtaaactggcagaaaggtgggttggagtattattag

SEQ ID NO: 1673 - DNA, 60 bp, synthetic construct
  source 1..60: mol_type = other DNA
agtattattagggtgagggtgtagacaactgcctcccttcgcgggttggagtattattag

SEQ ID NO: 1674 - DNA, 60 bp, synthetic construct
  source 1..60: mol_type = other DNA
agtattattagggtgaggtgcctggcaactggacgtaggccagggttggagtattattag

SEQ ID NO: 1675 - DNA, 60 bp, synthetic construct
  source 1..60: mol_type = other DNA
agtattattagggtgaggagatcccgttcgctacccacggaagggttggagtattattag

SEQ ID NO: 1676 - DNA, 60 bp, synthetic construct
  source 1..60: mol_type = other DNA
agtattattagggtgaggtcggagcattgttaagaggccagagggttggagtattattag

SEQ ID NO: 1677 - DNA, 65 bp, synthetic construct
  source 1..65: mol_type = other DNA
agtattattagggtgaggtggcactaacctttcctaatttccacggcgggttggagtattattag

SEQ ID NO: 1678 - DNA, 61 bp, synthetic construct
  source 1..61: mol_type = other DNA
agtattattagggtgagggtggacttaagcgcccacctagcgtgggttggagtattattag

SEQ ID NO: 1679 - DNA, 65 bp, synthetic construct
  source 1..65: mol_type = other DNA
agtattattagggtgaggccacgtcatacacaaaactattcgcaaacgggttggagtattattag

SEQ ID NO: 1680 - DNA, 62 bp, synthetic construct
  source 1..62: mol_type = other DNA
tgtaatagtaaggagggaagtggattgctcctttgattatcttcgggtgagtgtaatagtaa

SEQ ID NO: 1681 - DNA, 60 bp, synthetic construct
  source 1..60: mol_type = other DNA
tgtaatagtaaggagggagagctaccgtcatcatcttcagtcgggtgagtgtaatagtaa

SEQ ID NO: 1682 - DNA, 60 bp, synthetic construct
  source 1..60: mol_type = other DNA
tgtaatagtaaggagggagagcctcgttagcgggatgtcttcgggtgagtgtaatagtaa

SEQ ID NO: 1683 - DNA, 61 bp, synthetic construct
  source 1..61: mol_type = other DNA
tgtaatagtaaggagggactaacaagaatcaatagcaagcattgggtgagtgtaatagtaa

SEQ ID NO: 1684 - DNA, 60 bp, synthetic construct
  source 1..60: mol_type = other DNA
tgtaatagtaaggagggaagataccgtcatcatcttcactctgggtgagtgtaatagtaa

SEQ ID NO: 1685 - DNA, 60 bp, synthetic construct
  source 1..60: mol_type = other DNA
tgtaatagtaaggagggagcttgggaccatttttagggtaaagggtgagtgtaatagtaa

SEQ ID NO: 1686 - DNA, 62 bp, synthetic construct
  source 1..62: mol_type = other DNA
tgtaatagtaaggagggactaacaagaatcaatagcaagcttttgggtgagtgtaatagtaa

SEQ ID NO: 1687 - DNA, 63 bp, synthetic construct
  source 1..63: mol_type = other DNA
tgtaatagtaaggagggagtcgattgctcctttgattatcatcgtgggtgagtgtaatagtaa

SEQ ID NO: 1688 - DNA, 62 bp, synthetic construct
  source 1..62: mol_type = other DNA
agtattattagggtgaggagtggattgctcctttgattatcttcgggttggagtattattag

SEQ ID NO: 1689 - DNA, 60 bp, synthetic construct
  source 1..60: mol_type = other DNA
agtattattagggtgagggagctaccgtcatcatcttcagtcgggttggagtattattag

SEQ ID NO: 1690 - DNA, 60 bp, synthetic construct
  source 1..60: mol_type = other DNA
agtattattagggtgagggagcctcgttagcgggatgtcttcgggttggagtattattag

SEQ ID NO: 1691 - DNA, 61 bp, synthetic construct
  source 1..61: mol_type = other DNA
agtattattagggtgaggctaacaagaatcaatagcaagcattgggttggagtattattag

SEQ ID NO: 1692 - DNA, 60 bp, synthetic construct
  source 1..60: mol_type = other DNA
agtattattagggtgaggagataccgtcatcatcttcactctgggttggagtattattag

SEQ ID NO: 1693 - DNA, 60 bp, synthetic construct
  source 1..60: mol_type = other DNA
agtattattagggtgagggcttgggaccatttttagggtaaagggttggagtattattag

SEQ ID NO: 1694 - DNA, 62 bp, synthetic construct
  source 1..62: mol_type = other DNA
agtattattagggtgaggctaacaagaatcaatagcaagcttttgggttggagtattattag

SEQ ID NO: 1695 - DNA, 63 bp, synthetic construct
  source 1..63: mol_type = other DNA
agtattattagggtgagggtcgattgctcctttgattatcatcgtgggttggagtattattag

SEQ ID NO: 1696 - DNA, 61 bp, synthetic construct
  source 1..61: mol_type = other DNA
aatgatatgttgagtgggccgctcctatagcatgaggcctacggtggtggaatgatatgtt

SEQ ID NO: 1697 - DNA, 63 bp, synthetic construct
  source 1..63: mol_type = other DNA
aatgatatgttgagtgggtggatcgtagcaactagagacaagccagtggtggaatgatatgtt

SEQ ID NO: 1698 - DNA, 62 bp, synthetic construct
  source 1..62: mol_type = other DNA
aatgatatgttgagtgggtcgctgtgtccactttctctttcctcgtggtggaatgatatgtt

SEQ ID NO: 1699 - DNA, 60 bp, synthetic construct
  source 1..60: mol_type = other DNA
aatgatatgttgagtgggaaacatcggtcttgcacaacccgggtggtggaatgatatgtt

SEQ ID NO: 1700 - DNA, 61 bp, synthetic construct
  source 1..61: mol_type = other DNA
aatgatatgttgagtgggtaggcaagctagatcatgctgcgcagtggtggaatgatatgtt

SEQ ID NO: 1701 - DNA, 60 bp, synthetic construct
  source 1..60: mol_type = other DNA
aatgatatgttgagtgggtaggcaagctagatcatgctgggcgtggtggaatgatatgtt

SEQ ID NO: 1702 - DNA, 63 bp, synthetic construct
  source 1..63: mol_type = other DNA
aatgatatgttgagtgggtagcacctaatattagtaagtgcgtaagtggtggaatgatatgtt

SEQ ID NO: 1703 - DNA, 60 bp, synthetic construct
  source 1..60: mol_type = other DNA
aatgatatgttgagtgggctgcgatgcattttctgggatatcgtggtggaatgatatgtt

SEQ ID NO: 1704 - DNA, 61 bp, synthetic construct
  source 1..61: mol_type = other DNA
atgtattaagaggagggaccgctcctatagcatgaggcctacggaggaggatgtattaaga

SEQ ID NO: 1705 - DNA, 62 bp, synthetic construct
  source 1..62: mol_type = other DNA
atgtattaagaggagggaggatcgtagcaactagagacaagccagaggaggatgtattaaga

SEQ ID NO: 1706 - DNA, 62 bp, synthetic construct
  source 1..62: mol_type = other DNA
atgtattaagaggagggatcgctgtgtccactttctctttcctcgaggaggatgtattaaga

SEQ ID NO: 1707 - DNA, 60 bp, synthetic construct
  source 1..60: mol_type = other DNA
atgtattaagaggagggaaaacatcggtcttgcacaacccgggaggaggatgtattaaga

SEQ ID NO: 1708 - DNA, 61 bp, synthetic construct
  source 1..61: mol_type = other DNA
atgtattaagaggagggataggcaagctagatcatgctgcgcagaggaggatgtattaaga

SEQ ID NO: 1709 - DNA, 60 bp, synthetic construct
  source 1..60: mol_type = other DNA
atgtattaagaggagggataggcaagctagatcatgctgggcgaggaggatgtattaaga

SEQ ID NO: 1710 - DNA, 63 bp, synthetic construct
  source 1..63: mol_type = other DNA
atgtattaagaggagggatagcacctaatattagtaagtgcgtaagaggaggatgtattaaga

SEQ ID NO: 1711 - DNA, 60 bp, synthetic construct
  source 1..60: mol_type = other DNA
atgtattaagaggagggactgcgatgcattttctgggatatcgaggaggatgtattaaga

SEQ ID NO: 1712 - DNA, 63 bp, synthetic construct
  source 1..63: mol_type = other DNA
tgtataggattagaagggtttgcctttcaactttcttccatggccgggtgagtgtataggatt

SEQ ID NO: 1713 - DNA, 63 bp, synthetic construct
  source 1..63: mol_type = other DNA
tgtataggattagaagggtggtcggaaaatagtgttatacggatagggtgagtgtataggatt

SEQ ID NO: 1714 - DNA, 62 bp, synthetic construct
  source 1..62: mol_type = other DNA
tgtataggattagaagggagggcggaaaatagtgttatacgcatgggtgagtgtataggatt

SEQ ID NO: 1715 - DNA, 62 bp, synthetic construct
  source 1..62: mol_type = other DNA
tgtataggattagaagggtgctgggaagctctatctctagacacgggtgagtgtataggatt

SEQ ID NO: 1716 - DNA, 63 bp, synthetic construct
  source 1..63: mol_type = other DNA
tgtataggattagaagggtgtatactctcatccttgttcttcagagggtgagtgtataggatt

SEQ ID NO: 1717 - DNA, 63 bp, synthetic construct
  source 1..63: mol_type = other DNA
tgtataggattagaagggagggcggaaaatagtgttatacggatagggtgagtgtataggatt

SEQ ID NO: 1718 - DNA, 60 bp, synthetic construct
  source 1..60: mol_type = other DNA
tgtataggattagaagggaaagagattagcttagcctcggctgggtgagtgtataggatt

SEQ ID NO: 1719 - DNA, 61 bp, synthetic construct
  source 1..61: mol_type = other DNA
tgtataggattagaagggtaaactctcatccttgttcttcagagggtgagtgtataggatt

SEQ ID NO: 1720 - DNA, 63 bp, synthetic construct
  source 1..63: mol_type = other DNA
atgtattaagaggagggatttgcctttcaactttcttccatggccgaggaggatgtattaaga

SEQ ID NO: 1721 - DNA, 62 bp, synthetic construct
  source 1..62: mol_type = other DNA
atgtattaagaggagggaggtcggaaaatagtgttatacggatagaggaggatgtattaaga

SEQ ID NO: 1722 - DNA, 62 bp, synthetic construct
  source 1..62: mol_type = other DNA
atgtattaagaggagggaagggcggaaaatagtgttatacgcatgaggaggatgtattaaga

SEQ ID NO: 1723 - DNA, 61 bp, synthetic construct
  source 1..61: mol_type = other DNA
atgtattaagaggagggagctgggaagctctatctctagacacgaggaggatgtattaaga

SEQ ID NO: 1724 - DNA, 62 bp, synthetic construct
  source 1..62: mol_type = other DNA
atgtattaagaggagggagtatactctcatccttgttcttcagagaggaggatgtattaaga

SEQ ID NO: 1725 - DNA, 63 bp, synthetic construct
  source 1..63: mol_type = other DNA
atgtattaagaggagggaagggcggaaaatagtgttatacggatagaggaggatgtattaaga

SEQ ID NO: 1726 - DNA, 60 bp, synthetic construct
  source 1..60: mol_type = other DNA
atgtattaagaggagggaaaagagattagcttagcctcggctgaggaggatgtattaaga

SEQ ID NO: 1727 - DNA, 61 bp, synthetic construct
  source 1..61: mol_type = other DNA
atgtattaagaggagggataaactctcatccttgttcttcagagaggaggatgtattaaga

SEQ ID NO: 1728 - DNA, 61 bp, synthetic construct
  source 1..61: mol_type = other DNA
atggaagtagtagaagggtgtagctcccgggtgcttatgcccagggatgtatggaagtagt

SEQ ID NO: 1729 - DNA, 64 bp, synthetic construct
  source 1..64: mol_type = other DNA
atggaagtagtagaagggtgcgctaaagcaaacacacttcctaggtgggatgtatggaagtagt

SEQ ID NO: 1730 - DNA, 63 bp, synthetic construct
  source 1..63: mol_type = other DNA
atggaagtagtagaagggtgcgctaaagcaaacacacttccaagtgggatgtatggaagtagt

SEQ ID NO: 1731 - DNA, 61 bp, synthetic construct
  source 1..61: mol_type = other DNA
atggaagtagtagaagggactcgttatttctcggattcggagtgggatgtatggaagtagt

SEQ ID NO: 1732 - DNA, 62 bp, synthetic construct
  source 1..62: mol_type = other DNA
atggaagtagtagaagggcggtaaagcaaacacacttcctaggtgggatgtatggaagtagt

SEQ ID NO: 1733 - DNA, 60 bp, synthetic construct
  source 1..60: mol_type = other DNA
atggaagtagtagaagggtctttatttctcggattcgctggcgggatgtatggaagtagt

SEQ ID NO: 1734 - DNA, 61 bp, synthetic construct
  source 1..61: mol_type = other DNA
atggaagtagtagaagggtgcggtgttcctcctgatctcttgcgggatgtatggaagtagt

SEQ ID NO: 1735 - DNA, 60 bp, synthetic construct
  source 1..60: mol_type = other DNA
atggaagtagtagaagggcgtcgctcccgggtgcttatggccgggatgtatggaagtagt

SEQ ID NO: 1736 - DNA, 60 bp, synthetic construct
  source 1..60: mol_type = other DNA
atgtattaagaggagggagtagctcccgggtgcttatgcccagaggaggatgtattaaga

SEQ ID NO: 1737 - DNA, 62 bp, synthetic construct
  source 1..62: mol_type = other DNA
atgtattaagaggagggagcgctaaagcaaacacacttcctagggaggaggatgtattaaga

SEQ ID NO: 1738 - DNA, 61 bp, synthetic construct
  source 1..61: mol_type = other DNA
atgtattaagaggagggagcgctaaagcaaacacacttccaaggaggaggatgtattaaga

SEQ ID NO: 1739 - DNA, 60 bp, synthetic construct
  source 1..60: mol_type = other DNA
atgtattaagaggagggaactcgttatttctcggattcggaggaggaggatgtattaaga

SEQ ID NO: 1740 - DNA, 61 bp, synthetic construct
  source 1..61: mol_type = other DNA
atgtattaagaggagggacggtaaagcaaacacacttcctagggaggaggatgtattaaga

SEQ ID NO: 1741 - DNA, 60 bp, synthetic construct
  source 1..60: mol_type = other DNA
atgtattaagaggagggatctttatttctcggattcgctggcgaggaggatgtattaaga

SEQ ID NO: 1742 - DNA, 60 bp, synthetic construct
  source 1..60: mol_type = other DNA
atgtattaagaggagggagcggtgttcctcctgatctcttgcgaggaggatgtattaaga

SEQ ID NO: 1743 - DNA, 60 bp, synthetic construct
  source 1..60: mol_type = other DNA
atgtattaagaggagggacgtcgctcccgggtgcttatggccgaggaggatgtattaaga

SEQ ID NO: 1744 - DNA, 65 bp, synthetic construct
  source 1..65: mol_type = other DNA
tgtaatagtaaggagggaggcgctctcattcttaatatcttcgtagcgggtgagtgtaatagtaa

SEQ ID NO: 1745 - DNA, 60 bp, synthetic construct
  source 1..60: mol_type = other DNA
tgtaatagtaaggagggattctatctctacgcctgtcatgtcgggtgagtgtaatagtaa

SEQ ID NO: 1746 - DNA, 61 bp, synthetic construct
  source 1..61: mol_type = other DNA
tgtaatagtaaggagggaggtctgcaccgaataaatcctaagtgggtgagtgtaatagtaa

SEQ ID NO: 1747 - DNA, 60 bp, synthetic construct
  source 1..60: mol_type = other DNA
tgtaatagtaaggagggagtactttcgtccctgttgatacttgggtgagtgtaatagtaa

SEQ ID NO: 1748 - DNA, 61 bp, synthetic construct
  source 1..61: mol_type = other DNA
tgtaatagtaaggagggaaggatgcaatcctcgggttaacggtgggtgagtgtaatagtaa

SEQ ID NO: 1749 - DNA, 61 bp, synthetic construct
  source 1..61: mol_type = other DNA
tgtaatagtaaggagggacaatgtgatttgcttaacgtccggtgggtgagtgtaatagtaa

SEQ ID NO: 1750 - DNA, 61 bp, synthetic construct
  source 1..61: mol_type = other DNA
tgtaatagtaaggagggaagtgacttcgggtgcttccaagagtgggtgagtgtaatagtaa

SEQ ID NO: 1751 - DNA, 60 bp, synthetic construct
  source 1..60: mol_type = other DNA
tgtaatagtaaggagggagtagggattcctccccgacacaatgggtgagtgtaatagtaa

SEQ ID NO: 1752 - DNA, 65 bp, synthetic construct
  source 1..65: mol_type = other DNA
atgtattaagaggagggaggcgctctcattcttaatatcttcgtagcgaggaggatgtattaaga

SEQ ID NO: 1753 - DNA, 60 bp, synthetic construct
  source 1..60: mol_type = other DNA
atgtattaagaggagggattctatctctacgcctgtcatgtcgaggaggatgtattaaga

SEQ ID NO: 1754 - DNA, 60 bp, synthetic construct
  source 1..60: mol_type = other DNA
atgtattaagaggagggaggtctgcaccgaataaatcctaaggaggaggatgtattaaga

SEQ ID NO: 1755 - DNA, 60 bp, synthetic construct
  source 1..60: mol_type = other DNA
atgtattaagaggagggagtactttcgtccctgttgatacttgaggaggatgtattaaga

SEQ ID NO: 1756 - DNA, 60 bp, synthetic construct
  source 1..60: mol_type = other DNA
atgtattaagaggagggaaggatgcaatcctcgggttaacgggaggaggatgtattaaga

SEQ ID NO: 1757 - DNA, 60 bp, synthetic construct
  source 1..60: mol_type = other DNA
atgtattaagaggagggacaatgtgatttgcttaacgtccgggaggaggatgtattaaga

SEQ ID NO: 1758 - DNA, 60 bp, synthetic construct
  source 1..60: mol_type = other DNA
atgtattaagaggagggaagtgacttcgggtgcttccaagaggaggaggatgtattaaga

SEQ ID NO: 1759 - DNA, 60 bp, synthetic construct
  source 1..60: mol_type = other DNA
atgtattaagaggagggagtagggattcctccccgacacaatgaggaggatgtattaaga

SEQ ID NO: 1760 - DNA, 62 bp, synthetic construct
  source 1..62: mol_type = other DNA
aatgatatgttgagtgggtttttctctccaatttgtaacgaagagtggtggaatgatatgtt

SEQ ID NO: 1761 - DNA, 61 bp, synthetic construct
  source 1..61: mol_type = other DNA
aatgatatgttgagtgggtgatgcctctatatagttggctgtggtggtggaatgatatgtt

SEQ ID NO: 1762 - DNA, 61 bp, synthetic construct
  source 1..61: mol_type = other DNA
aatgatatgttgagtgggttatctctccaatttgtaacgaagagtggtggaatgatatgtt

SEQ ID NO: 1763 - DNA, 65 bp, synthetic construct
  source 1..65: mol_type = other DNA
aatgatatgttgagtgggaggctagtatcatgtgatacttatgggtagtggtggaatgatatgtt

SEQ ID NO: 1764 - DNA, 64 bp, synthetic construct
  source 1..64: mol_type = other DNA
aatgatatgttgagtgggtgaaccactagtatcatgtgatactatagtggtggaatgatatgtt

SEQ ID NO: 1765 - DNA, 63 bp, synthetic construct
  source 1..63: mol_type = other DNA
aatgatatgttgagtgggaaactccatatcactacttagcttagggtggtggaatgatatgtt

SEQ ID NO: 1766 - DNA, 66 bp, synthetic construct
  source 1..66: mol_type = other DNA
aatgatatgttgagtgggtgctgcacagattacttaatataaccttgtgtggtggaatgatatgtt

SEQ ID NO: 1767 - DNA, 61 bp, synthetic construct
  source 1..61: mol_type = other DNA
aatgatatgttgagtgggtgtaaccacctgtatagacgtcggcgtggtggaatgatatgtt

SEQ ID NO: 1768 - DNA, 62 bp, synthetic construct
  source 1..62: mol_type = other DNA
tagaattagagagatgggtttttctctccaatttgtaacgaagaggtggagtagaattagag

SEQ ID NO: 1769 - DNA, 61 bp, synthetic construct
  source 1..61: mol_type = other DNA
tagaattagagagatgggtgatgcctctatatagttggctgtgggtggagtagaattagag

SEQ ID NO: 1770 - DNA, 61 bp, synthetic construct
  source 1..61: mol_type = other DNA
tagaattagagagatgggttatctctccaatttgtaacgaagaggtggagtagaattagag

SEQ ID NO: 1771 - DNA, 65 bp, synthetic construct
  source 1..65: mol_type = other DNA
tagaattagagagatgggaggctagtatcatgtgatacttatgggtaggtggagtagaattagag

SEQ ID NO: 1772 - DNA, 64 bp, synthetic construct
  source 1..64: mol_type = other DNA
tagaattagagagatgggtgaaccactagtatcatgtgatactataggtggagtagaattagag

SEQ ID NO: 1773 - DNA, 64 bp, synthetic construct
  source 1..64: mol_type = other DNA
tagaattagagagatgggaaactccatatcactacttagcttaggtggtggagtagaattagag

SEQ ID NO: 1774 - DNA, 66 bp, synthetic construct
  source 1..66: mol_type = other DNA
tagaattagagagatgggtgctgcacagattacttaatataaccttgtggtggagtagaattagag

SEQ ID NO: 1775 - DNA, 61 bp, synthetic construct
  source 1..61: mol_type = other DNA
tagaattagagagatgggtgtaaccacctgtatagacgtcggcggtggagtagaattagag

SEQ ID NO: 1776 - DNA, 60 bp, synthetic construct
  source 1..60: mol_type = other DNA
atggaagtagtagaagggtgcaccgggagcctttggcacggtgggatgtatggaagtagt

SEQ ID NO: 1777 - DNA, 61 bp, synthetic construct
  source 1..61: mol_type = other DNA
atggaagtagtagaagggtggctcggcttttcaccccgaaggtgggatgtatggaagtagt

SEQ ID NO: 1778 - DNA, 61 bp, synthetic construct
  source 1..61: mol_type = other DNA
atggaagtagtagaagggaaacttccgacttgtattgcccagtgggatgtatggaagtagt

SEQ ID NO: 1779 - DNA, 64 bp, synthetic construct
  source 1..64: mol_type = other DNA
atggaagtagtagaagggtgcgctcagtcaattaacattccaaggtgggatgtatggaagtagt

SEQ ID NO: 1780 - DNA, 63 bp, synthetic construct
  source 1..63: mol_type = other DNA
atggaagtagtagaagggtggcaacttcctcttaattgcttccgagggatgtatggaagtagt

SEQ ID NO: 1781 - DNA, 60 bp, synthetic construct
  source 1..60: mol_type = other DNA
atggaagtagtagaagggagcagctccctgctttcgcttcccgggatgtatggaagtagt

SEQ ID NO: 1782 - DNA, 60 bp, synthetic construct
  source 1..60: mol_type = other DNA
atggaagtagtagaagggacgagctttctctgtttgctagacgggatgtatggaagtagt

SEQ ID NO: 1783 - DNA, 60 bp, synthetic construct
  source 1..60: mol_type = other DNA
atggaagtagtagaagggacgcgtagggaacagaatgtttgagggatgtatggaagtagt

SEQ ID NO: 1784 - DNA, 60 bp, synthetic construct
  source 1..60: mol_type = other DNA
tagaattagagagatgggtgcaccgggagcctttggcacggtggtggagtagaattagag

SEQ ID NO: 1785 - DNA, 61 bp, synthetic construct
  source 1..61: mol_type = other DNA
tagaattagagagatgggtggctcggcttttcaccccgaaggtggtggagtagaattagag

SEQ ID NO: 1786 - DNA, 60 bp, synthetic construct
  source 1..60: mol_type = other DNA
tagaattagagagatgggaaacttccgacttgtattgcccagggtggagtagaattagag

SEQ ID NO: 1787 - DNA, 64 bp, synthetic construct
  source 1..64: mol_type = other DNA
tagaattagagagatgggtgcgctcagtcaattaacattccaaggtggtggagtagaattagag

SEQ ID NO: 1788 - DNA, 63 bp, synthetic construct
  source 1..63: mol_type = other DNA
tagaattagagagatgggtggcaacttcctcttaattgcttccgaggtggagtagaattagag

SEQ ID NO: 1789 - DNA, 60 bp, synthetic construct
  source 1..60: mol_type = other DNA
tagaattagagagatgggagcagctccctgctttcgcttcccggtggagtagaattagag

SEQ ID NO: 1790 - DNA, 60 bp, synthetic construct
  source 1..60: mol_type = other DNA
tagaattagagagatgggacgagctttctctgtttgctagacggtggagtagaattagag

SEQ ID NO: 1791 - DNA, 60 bp, synthetic construct
  source 1..60: mol_type = other DNA
tagaattagagagatgggacgcgtagggaacagaatgtttgaggtggagtagaattagag

SEQ ID NO: 1792 - DNA, 60 bp, synthetic construct
  source 1..60: mol_type = other DNA
ggatagagtatagttgggcgtcccctctgtaagcggattagaggatggaggatagagtat

SEQ ID NO: 1793 - DNA, 61 bp, synthetic construct
  source 1..61: mol_type = other DNA
ggatagagtatagttgggccaccgtcaaatttctctttctagaggatggaggatagagtat

SEQ ID NO: 1794 - DNA, 61 bp, synthetic construct
  source 1..61: mol_type = other DNA
ggatagagtatagttgggtgtgcctatcggcaacacttagatgggatggaggatagagtat

SEQ ID NO: 1795 - DNA, 61 bp, synthetic construct
  source 1..61: mol_type = other DNA
ggatagagtatagttgggtgcgtgtctccataacttcgcacccggatggaggatagagtat

SEQ ID NO: 1796 - DNA, 61 bp, synthetic construct
  source 1..61: mol_type = other DNA
ggatagagtatagttgggaagccattttatcaatggcagtgatggatggaggatagagtat

SEQ ID NO: 1797 - DNA, 60 bp, synthetic construct
  source 1..60: mol_type = other DNA
ggatagagtatagttgggtctgctccctcatttctgttaccgggatggaggatagagtat

SEQ ID NO: 1798 - DNA, 63 bp, synthetic construct
  source 1..63: mol_type = other DNA
ggatagagtatagttgggtgtctaaaatgctttttccattgtggaggatggaggatagagtat

SEQ ID NO: 1799 - DNA, 64 bp, synthetic construct
  source 1..64: mol_type = other DNA
ggatagagtatagttgggtgaagttcatcagtatcttttgcccatgggatggaggatagagtat

SEQ ID NO: 1800 - DNA, 60 bp, synthetic construct
  source 1..60: mol_type = other DNA
tagaattagagagatgggcgtcccctctgtaagcggattagaggtggagtagaattagag

SEQ ID NO: 1801 - DNA, 61 bp, synthetic construct
  source 1..61: mol_type = other DNA
tagaattagagagatgggccaccgtcaaatttctctttctagaggtggagtagaattagag

SEQ ID NO: 1802 - DNA, 61 bp, synthetic construct
  source 1..61: mol_type = other DNA
tagaattagagagatgggtgtgcctatcggcaacacttagatgggtggagtagaattagag

SEQ ID NO: 1803 - DNA, 61 bp, synthetic construct
  source 1..61: mol_type = other DNA
tagaattagagagatgggtgcgtgtctccataacttcgcacccggtggagtagaattagag

SEQ ID NO: 1804 - DNA, 61 bp, synthetic construct
  source 1..61: mol_type = other DNA
tagaattagagagatgggaagccattttatcaatggcagtgatggtggagtagaattagag

SEQ ID NO: 1805 - DNA, 60 bp, synthetic construct
  source 1..60: mol_type = other DNA
tagaattagagagatgggtctgctccctcatttctgttaccgggtggagtagaattagag

SEQ ID NO: 1806 - DNA, 63 bp, synthetic construct
  source 1..63: mol_type = other DNA
tagaattagagagatgggtgtctaaaatgctttttccattgtggaggtggagtagaattagag

SEQ ID NO: 1807 - DNA, 64 bp, synthetic construct
  source 1..64: mol_type = other DNA
tagaattagagagatgggtgaagttcatcagtatcttttgcccatgggtggagtagaattagag

SEQ ID NO: 1808 - DNA, 20 bp, synthetic construct
  source 1..20: mol_type = other DNA
cgatgcgccaattccggttc

SEQ ID NO: 1809 - DNA, 20 bp, synthetic construct
  source 1..20: mol_type = other DNA
gtctattttcttatccgacg

SEQ ID NO: 1810 - DNA, 18 bp, synthetic construct
  source 1..18: mol_type = other DNA
ttaatatgggtagttggg

SEQ ID NO: 1811 - DNA, 18 bp, synthetic construct
  source 1..18: mol_type = other DNA
ggaatttagtgagaaggg

SEQ ID NO: 1812 - DNA, 18 bp, synthetic construct
  source 1..18: mol_type = other DNA
gtaatagatatgagggtg

SEQ ID NO: 1813 - DNA, 18 bp, synthetic construct
  source 1..18: mol_type = other DNA
tgtaatagtaaggaggga

SEQ ID NO: 1814 - DNA, 18 bp, synthetic construct
  source 1..18: mol_type = other DNA
ggataataaggagggatg

SEQ ID NO: 1815 - DNA, 18 bp, synthetic construct
  source 1..18: mol_type = other DNA
atggaagtagtagaaggg

SEQ ID NO: 1816 - DNA, 18 bp, synthetic construct
  source 1..18: mol_type = other DNA
tgtataggattagaaggg

SEQ ID NO: 1817 - DNA, 18 bp, synthetic construct
  source 1..18: mol_type = other DNA
tagaattagagagatggg

SEQ ID NO: 1818 - DNA, 18 bp, synthetic construct
  source 1..18: mol_type = other DNA
atgtattaagaggaggga

SEQ ID NO: 1819 - DNA, 18 bp, synthetic construct
  source 1..18: mol_type = other DNA
gataagtaagtagggatg

SEQ ID NO: 1820 - DNA, 18 bp, synthetic construct
  source 1..18: mol_type = other DNA
tatagttatggagaaggg

SEQ ID NO: 1821 - DNA, 45 bp, synthetic construct
  source 1..45: mol_type = other DNA
ttaatatgggtagttgggcctcagttaatgatagtgtgtcgattg

What is claimed is:

1. A method of characterizing a microbial cell from a biological sample, the method comprising
a) directly inoculating the microbe onto a device;
b) identifying the microbe; and
c) detecting susceptibility to one or more antimicrobial agents.

2. A method of characterizing a microbial cell from a biological sample, the method comprising
a) directly inoculating the microbe onto a device;
b) identifying the microbe; and
c) detecting future susceptibility to one or more antimicrobial agents.

3. The method of claim 1, wherein the sample is not subjected to culturing before the microbe is inoculated onto the device.

4. The method of claim 1, wherein the microbe in the sample is cultured for one or more cell divisions before it is inoculated onto the device.

5. The method of claim 1, wherein the microbe is identified by in situ hybridization.

6. The method of claim 5, wherein the microbe is identified by fluorescence in situ hybridization (FISH).

7. The method of claim 5, wherein the fluorescence in situ hybridization is high-phylogenetic-resolution fluorescence in situ hybridization (HiPR-FISH).

8. The method of claim 5, wherein the microbe is further characterized via live-cell imaging or dynamic calculation while in situ hybridization is performed.

9. The method of claim 1, wherein the microbe is identified by hybridization of a bar-coded probe a 16S ribosomal RNA sequence in the microbe, 5S ribosomal RNA sequence in the microbe, and/or 23 S ribosomal RNA sequence in the microbe.

10. The method of claim 6, wherein the in situ hybridization is multiplexed.

11. The method of claim 1, wherein the susceptibility to one or more microbial agents is determined by measuring the minimum inhibitory concentration of the microbe when exposed to an antimicrobial agent.

12. The method of claim 1, wherein the susceptibility to one or more microbial agents is determined by measuring microbial cell metabolism when the microbe is exposed to an antimicrobial agent.

13. The method of claim 12, wherein microbial cell metabolism is measured by determining the concentration of dissolved carbon dioxide, oxygen consumption of microbes in the sample, expression of genes involved in cell division and/or growth, or expression of stress response genes.

14. The method of claim 1, wherein microbial cell susceptibility is determined by a live/dead stain.

15. The method of claim 1, wherein microbial cell susceptibility is determined by cell number.

16. The method of claim 1, wherein microbial cell susceptibility is determined by detecting the presence or absence of one or more antimicrobial genes in the microbial cell.

17. The method of claim 1, wherein microbial cell susceptibility is determined by detecting the presence or absence of one or more gene mutations associated with the development of antimicrobial resistance or susceptibility in the microbial cell.

18. The method of claim 2, wherein future microbial cell susceptibility is determined by detecting the presence or absence of one or more antimicrobial genes in the microbial cell.

19. The method of claim 2, wherein future microbial cell susceptibility is determined by detecting the presence or absence of one or more gene mutations associated with the development of antimicrobial resistance or susceptibility in the microbial cell.

20. The method of claim 17, wherein the one or more gene mutations associated with the development of antimicrobial resistance or susceptibility is selected from deletions, duplications, single nucleotide polymorphisms (SNPs), frame-shift mutations, inversions, insertions, and/or nucleotide substitutions.

21. The method of claim 16, wherein the one or more antimicrobial genes is selected from: genes encoding multidrug resistance proteins (e.g. PDR1, PDR3, PDR7, PDR9), ABC transporters (e.g. SNQ2, STE6, PDR5, PDR10, PDR11, YOR1), membrane associated transporters (GAS1, D4405), soluble proteins (e.g. G3PD), RNA polymerase, rpoB, gyrA, gyrB, 16S RNA, 23S rRNA, NADPH nitroreductase, sul2, strAB, tetAR, aac3-iid, aph, sph, cmy-2, floR, tetB; aadA, aac3-VIa, and sul1.

22. The method of claim 16, wherein the presence or absence of one or more antimicrobial genes, or the gene mutation associated with the development of antimicrobial resistance or susceptibility in the microbial cell is detected using in situ hybridization.

23. The method of claim 22, wherein the presence or absence of one or more antimicrobial genes, or the gene mutation associated with the development of antimicrobial resistance or susceptibility in the microbial cell is detected using fluorescence in situ hybridization (FISH).

24. The method of claim 23, wherein the fluorescence in situ hybridization is high-phylogenetic-resolution fluorescence in situ hybridization (HiPR-FISH).

25. The method claim 1, wherein the identification of the microbial cell and the detection of susceptibility or future susceptibility to one or more antimicrobial agents occurs sequentially.

26. The method of claim 1, wherein the identification of the microbial cell and the detection of susceptibility or future susceptibility to one or more antimicrobial agents occurs simultaneously.

27. The method of claim 1, wherein the identification of the microbial cell and the detection of susceptibility or future susceptibility to one or more antimicrobial agents occurs in parallel.

28. The method of claim 1, wherein the biological sample is obtained from a patient.

29. The method of claim 1, wherein the biological sample is obtained from a patient diagnosed with or believed to be suffering from an infection or disorder.

30. The method of claim 29, wherein the disease or disorder is an infection.

31. The method of claim 30, wherein the infection is a bacterial, viral, fungal, or parasitic infections.

32. The method of claim 31, wherein the bacterial infection is selected from Mycobacterium, Streptococcus, Staphylococcus, Shigella, Campylobacter, Salmonella, Clostridium, Corynebacterium, Pseudomonas, Neisseria, Listeria, Vibrio, Bordetella, E. coli (including pathogenic E. coli), Pseudomonas aeruginosa, Enterobacter cloacae, Mycobacterium tuberculosis, Staphylococcus aureus, Helicobacter pylori, Legionella, Acinetobacter baumannii, Citrobacter freundii, Citrobacter koseri, Enterobacter cloacae, Enterococcus faecalis, Enterococcus faecium, Escherichia coli, Klebsiella oxytoca, Klebsiella pneumoniae, Proteus mirabilis, Proteus vulgaris, Pseudomonas aeruginosa, Serratia marcescens, Staphylococcus aureus, Staphylococcus saprophyticus, and Streptococcus agalactiae, or a combination thereof.

33. The method of claim 31, wherein the viral infection is selected from Helicobacter pylori, infectious haematopoietic necrosis virus (IHNV), Parvovirus B19, Herpes Simplex Virus, Varicella-zoster virus, Cytomegalovirus, Epstein-Barr virus, Hepatitis A virus, Hepatitis B virus, Hepatitis C virus, Hepatitis D virus, Hepatitis E virus, Measles virus, Mumps virus, Rubella virus, Human Immunodeficiency Virus (HIV), Influenza virus, Rhinovirus, Rotavirus A, Rotavirus B, Rotavirus C, Respiratory Syncytial Virus (RSV), Varicella zoster, Poliovirus, Norovirus, Zika Virus, Dengue Virus, Rabies Virus, Newcastle Disease Virus, and White Spot Syndrome Virus, or a combination thereof.

34. The method of claim 31, wherein the fungal infection is selected from Aspergillus, Candida, Pneumocystis, Blastomyces, Coccidioides, Cryptococcus, and Histoplasma, or a combination thereof.

35. The method of claim 31, wherein the parasitic infection is selected from Plasmodium (i.e. P. falciparum, P. malariae, P. ovale, P. knowlesi, and P. vivax), Trypanosoma, Toxoplasma, Giardia, and Leishmania, Cryptosporidium, helminthic parasites: Trichuris spp. (whipworms), Enterobius spp. (pinworms), Ascaris spp. (roundworms), Ancylostoma spp. and Necator spp. (hookworms), Strongyloides spp. (threadworms), Dracunculus spp. (Guinea worms), Onchocerca spp. and Wuchereria spp. (filarial worms), Taenia spp., Echinococcus spp., and Diphyllobothrium spp. (human and animal cestodes), Fasciola spp. (liver flukes) and Schistosoma spp. (blood flukes), or a combination thereof.

36. The method of claim 1, wherein the biological sample is selected from bronchoalveolar lavage fluid (BAL), blood, serum, plasma, urine, cerebrospinal fluid, pleural fluid, synovial fluid, ocular fluid, peritoneal fluid, amniotic fluid, gastric fluid, lymph fluid, interstitial fluid, tissue homogenate, cell extracts, saliva, sputum, stool, physiological secretions, tears, mucus, sweat, milk, semen, seminal fluid, vaginal secretions, fluid from ulcers and other surface eruptions, blisters, and abscesses, and extracts of tissues including biopsies of normal, malignant, and suspect tissues or any other constituents of the body which may contain the microorganism of interest.

37. The method of claim 1, wherein the biological sample is a human oral microbiome sample.

38. The method of claim 1, wherein the biological sample is a whole organism.

39. A method for analyzing a sample, comprising:
contacting at least one encoding probe with the sample to produce a first complex, wherein each encoding probe comprises a targeting sequence, a first landing pad sequence, and a second landing pad sequence;
adding at least one first emissive readout probe to the first complex, wherein the first emissive readout probe comprises a label and a sequence complementary to the first landing pad sequence;
acquiring one or more emission spectra from the first emissive readout probe;
adding an exchange probe to the sample, wherein the exchange probe comprises a 100% complementary sequence to the first emissive readout probe sequence,
hybridizing the exchange probe to the first emissive readout probe to form a second complex;
removing the second complex from the sample,
adding at least one second emissive readout probe to the first complex, wherein the second emissive readout probe comprises a label and a sequence complementary to the second landing pad sequence;
acquiring one or more emission spectra from the second emissive readout probe;
repeating the aforementioned steps for at least one different encoding probe;
determining the spectra of “signal” (e.g., puncta, blobs) and assigning them to a species of interest; and
decoding the spectra into a single, targeted transcript through means of signal deconvolution, error correction, comparison to reference standards.

40. A method for analyzing a sample, comprising:
generating a set of probes, wherein each probe comprises:
(i) a targeting sequence;
(ii) a first landing pad sequence; and
(iii) a second landing pad sequence;
contacting the set of probes with the sample to permit hybridization of the probes to nucleotides present in the sample to produce a complex;
adding a first set of emissive readout probes to the complex, wherein each emissive readout probe comprises:
(i) a label, and
(ii) a sequence complementary to the first or second landing pad sequence;
acquiring one or more emission spectra from the first emissive readout probe;
adding a set of exchange probes to the sample, wherein each exchange probe comprises a 100% complementary sequence to the first emissive readout probe sequences,
hybridizing the exchange probes to the first emissive readout probes to form a second complex;
removing the second complex from the sample,
adding a second set of emissive readout probes to the complex, wherein each emissive readout probe comprises:
(i) a label, and
(ii) a sequence complementary to the first or second landing pad sequence;
acquiring one or more emission spectra from the second emissive readout probe;
determining the spectra of “signal” (e.g., puncta, blobs) and assigning them to a species of interest; and
decoding the spectra into a single, targeted transcript through means of signal deconvolution, error correction, comparison to reference standards.

41. The method of claim 39, wherein the sample is at least one of a cell, a cell suspension, a tissue biopsy, a tissue specimen, urine, stool, blood, serum, plasma, bone biopsies, bone marrow, respiratory specimens, sputum, induced sputum, tracheal aspirates, bronchoalveolar lavage fluid, sweat, saliva, tears, ocular fluid, cerebral spinal fluid, pericardial fluid, pleural fluid, peritoneal fluid, placenta, amnion, pus, nasal swabs, nasopharyngeal swabs, oropharyngeal swabs, ocular swabs, skin swabs, wound swabs, mucosal swabs, buccal swabs, vaginal swabs, vulvar swabs, nails, nail scrapings, hair follicles, corneal scrapings, gavage fluids, gargle fluids, abscess fluids, wastewater, or plant biopsies.

42. The method of claim 41, wherein the sample is a cell.

43. The method of claim 42, wherein the cell is a bacterial or eukaryotic cell.

44. The method of claim 41, wherein the sample comprises a plurality of cells.

45. The method of claim 44, wherein each cell comprises a specific targeting sequence.

46. The method of claim 39, wherein the targeting sequence targets at least one of messenger RNA (mRNA), micro RNA (miRNA), long non-coding RNA (lncRNA), ribosomal RNA (rRNA), small interfering RNA (siRNA), transfer RNA (tRNA), Crispr RNA (crRNA), trans-activating crispr RNA (tracrRNA), mitochondria RNA, Intronic RNA, viral mRNA, viral genomic RNA, environmental RNA, double-stranded RNA (dsRNA), small nuclear RNA (snRNA), small nucleolar (snoRNA), piwi-interacting RNA (piRNA), genomic DNA, synthetic DNA, DNA, plasmid DNA, a plasmid, viral DNA, retroviral DNA, environmental DNA, extracellular DNA, a protein, a small molecule, or an antigenic target.

47. The method of claim 46, wherein the target is mRNA.

48. The method of claim 46, wherein the target is rRNA.

49. The method of claim 46, wherein the target is mRNA and rRNA.

50. The method of claim 39, wherein the at least one encoding probe comprises the first landing pad sequence on the 5′ end, and the second landing pad sequence on the 3′ end.

51. The method of claim 39, wherein the at least one encoding probe comprises the first landing pad sequence on the 3′ end, and the second landing pad sequence on the 5′ end.

52. The method of claim 50, wherein the first landing pad sequence and the second landing pad sequences have different sequences.

53. The method of claim 39, wherein the at least one first or second emissive readout probe comprises a label on the 5′ or 3′ end.

54. The method of claim 39, wherein the label is Alexa Fluor 350, Alexa Fluor 405, Alexa Fluor 430, Alexa Fluor 488, Alexa Fluor 514, Alexa Fluor 532, Alexa Fluor 546, Alexa Fluor 555, Alexa Fluor 561, Alexa Fluor 568, Alexa Fluor 594, Alexa Fluor 610, Alexa Fluor 633, Alexa Fluor 635, Alexa Fluor 647, Alexa Fluor 647-R-phycoerythrin, Alexa Fluor 660, Alexa Fluor 680, Alexa Fluor 680-allophycocyanin, Alexa Fluor 700, Alexa Fluor 750, Alexa Fluor 790, Alexa Fluor Plus 405, Alexa Fluor Plus 488, Alexa Fluor Plus 555, Alexa Fluor Plus 594, Alexa Fluor Plus 647, Alexa Fluor Plus 680, Alexa Fluor Plus 750, Alexa Fluor Plus 800, Pacific Blue, Pacific Green, Rhodamine Red X, DyLight 485-LS, DyLight-510-LS, DyLight 515-LS, DyLight 521-LS, Hydroxycoumarin, methoxycoumarin, Cy2, FAM, Fluorescein FITC, R-phycoerythrin (PE), Tamara, Cy3.5 581, Rox, Red 613, Texas Red, Cy5, Cy5.5, Cy7, Allophycocyanin, ATTO 430LS, ATTO 490LS, ATTO 390, ATTO 425, Cyan 500 NHS-Ester, ATTO 465, ATTO 488, ATTO 495, ATTO Rho110, ATTO 514, ATTO 520, ATTO 532, ATTO Rho6G, ATTO 542, ATTO 550, ATTO 565, ATTO Rho3B, ATTO Rho11, ATTO Rho12, ATTO Thio12, ATTO Rho101, ATTO 590, ATTO 594, ATTO Rho13, ATTO 610, ATTO 620, ATTO Rho14, ATTO 633, ATTO 643, ATTO 647, ATTO 647N, ATTO 655, ATTO Oxa12, ATTO 665, ATTO 680, ATTO 700, ATTO 725, ATTO 740.

55. The method of claim 39, wherein the one or more emission spectra of the first and/or second emissive readout probe is acquired via widefield microscopy, point scanning confocal microscopy, spinning disk confocal microscopy, lattice lightsheet microscopy, or light field microscopy.

56. The method of claim 55, wherein the detection strategy used is channel, spectral, channel and fluorescence lifetime, or spectral and fluorescence lifetime.

57. The method of claim 39, wherein the sample is on an analyzing platform, wherein the analyzing platform is a microscope slide, at least one chamber, at least one microfluidic device, at least one well, at least one plate, or at least one filter membrane.

58. The method of claim 39, wherein adding an exchange probe to the sample, hybridizing the exchange probe to the first emissive readout probe, and removing the second complex from the sample are performed in the same step.

59. The method of claim 39, wherein hybridizing the exchange probe to the first or second emissive readout probe results in de-hybridization of the first or second emissive readout probe from the first or second landing pad sequence.

60. The method of claim 58, wherein the step is achieved within 1 hour.

61. The method of claim 58, wherein the step is achieved overnight.

62. The method of claim 39, wherein the emissive readout probe sequence is at least 5 nucleotides longer than the first or second landing pad sequences.

63. A construct comprising:
a targeting sequence that is a region of interest on a nucleotide;
a first landing pad sequence;
a second landing pad sequence, wherein the second landing pad sequence is different from the first landing pad sequence;
a first emissive readout probe comprising a first label and a sequence complimentary to the first landing pad sequence;
an exchange probe comprising a 100% complementary sequence to the first emissive readout probe sequences; and
a second emissive readout probe comprising a second label and a sequence complimentary to the second landing pad sequence.

64. A library of constructs comprising a plurality of barcoded probes, wherein each barcoded probe comprises:
a targeting sequence that is a region of interest on a nucleotide;
a first landing pad sequence;
a second landing pad sequence, wherein the second landing pad sequence is different from the first landing pad sequence;
a first emissive readout probe comprising a first label and a sequence complimentary to the first landing pad sequence;
an exchange probe comprising a 100% complementary sequence to the first emissive readout probe sequences; and
a second emissive readout probe comprising a second label and a sequence complimentary to the second landing pad sequence.

65. The construct of claim 63, wherein the first emissive readout probe sequence is at least 5 nucleotides longer than the first landing pad sequence.

66. The construct of claim 63, wherein the second emissive readout probe sequence is at least 5 nucleotides longer than the second landing pad sequence.

67. The construct of claim 63, wherein the first landing pad sequence and the second landing pad sequences have different sequences.

68. The construct of claim 63, wherein the first emissive readout probe comprises the first label on the 5′ or 3′ end.

69. The construct of claim 63, wherein the second emissive readout probe comprises the second label on the 5′ or 3′ end.

70. The construct of claim 63, wherein the first or second label is each Alexa Fluor 350, Alexa Fluor 405, Alexa Fluor 430, Alexa Fluor 488, Alexa Fluor 514, Alexa Fluor 532, Alexa Fluor 546, Alexa Fluor 555, Alexa Fluor 561, Alexa Fluor 568, Alexa Fluor 594, Alexa Fluor 610, Alexa Fluor 633, Alexa Fluor 635, Alexa Fluor 647, Alexa Fluor 647-R-phycoerythrin, Alexa Fluor 660, Alexa Fluor 680, Alexa Fluor 680-allophycocyanin, Alexa Fluor 700, Alexa Fluor 750, Alexa Fluor 790, Alexa Fluor Plus 405, Alexa Fluor Plus 488, Alexa Fluor Plus 555, Alexa Fluor Plus 594, Alexa Fluor Plus 647, Alexa Fluor Plus 680, Alexa Fluor Plus 750, Alexa Fluor Plus 800, Pacific Blue, Pacific Green, Rhodamine Red X, DyLight 485-LS, DyLight-510-LS, DyLight 515-LS, DyLight 521-LS, Hydroxycoumarin, methoxycoumarin, Cy2, FAM, Fluorescein FITC, R-phycoerythrin (PE), Tamara, Cy3.5 581, Rox, Red 613, Texas Red, Cy5, Cy5.5, Cy7, Allophycocyanin, ATTO 430LS, ATTO 490LS, ATTO 390, ATTO 425, Cyan 500 NHS-Ester, ATTO 465, ATTO 488, ATTO 495, ATTO Rho110, ATTO 514, ATTO 520, ATTO 532, ATTO Rho6G, ATTO 542, ATTO 550, ATTO 565, ATTO Rho3B, ATTO Rho11, ATTO Rho12, ATTO Thio12, ATTO Rho101, ATTO 590, ATTO 594, ATTO Rho13, ATTO 610, ATTO 620, ATTO Rho14, ATTO 633, ATTO 643, ATTO 647, ATTO 647N, ATTO 655, ATTO Oxa12, ATTO 665, ATTO 680, ATTO 700, ATTO 725, or ATTO 740.

71. A method for analyzing a bacterial sample, comprising:
contacting at least one encoding probe with the sample to produce a first complex, wherein each encoding probe comprises a targeting sequence, a first landing pad sequence, and a second landing pad sequence;
adding at least one first emissive readout probe to the first complex, wherein the first emissive readout probe comprises a label and a sequence complementary to the first landing pad sequence;
detecting the first emissive readout probe with a confocal microscope;
adding an exchange probe to the sample, wherein the exchange probe comprises a 100% complementary sequence to the first emissive readout probe sequence,
hybridizing the exchange probe to the first emissive readout probe to form a second complex;
removing the second complex from the sample,
adding at least one second emissive readout probe to the first complex, wherein the second emissive readout probe comprises a label and a sequence complementary to the second landing pad sequence;
detecting the second emissive readout probe with a confocal microscope;
repeating the aforementioned steps for at least one different encoding probe;
determining the spectra of “signal” (e.g., puncta, blobs) and assigning them to a bacterium; and
decoding the spectra into a single, targeted transcript through means of signal deconvolution, error correction, comparison to reference standards.

72. A method for analyzing a bacterial sample, comprising:
generating a set of probes, wherein each probe comprises:
(iv) a targeting sequence;
(v) a first landing pad sequence; and
(vi) a second landing pad sequence;
contacting the set of probes with the sample to permit hybridization of the probes to nucleotides present in the sample to produce a complex;
adding a first set of emissive readout probes to the complex, wherein each emissive readout probe comprises:
(i) a label, and
(ii) a sequence complementary to the first or second landing pad sequence;
detecting the first set of emissive readout probes in the sample with a confocal microscope;
adding a set of exchange probes to the sample, wherein each exchange probe comprises a 100% complementary sequence to the first emissive readout probe sequences,
hybridizing the exchange probes to the first emissive readout probes to form a second complex;
removing the second complex from the sample,
adding a second set of emissive readout probes to the complex, wherein each emissive readout probe comprises:
(i) a label, and
(ii) a sequence complementary to the first or second landing pad sequence;
detecting the second set of emissive readout probes in the sample with a confocal microscope;
determining the spectra of “signal” (e.g., puncta, blobs) and assigning them to a bacterium; and
decoding the spectra into a single, targeted transcript through means of signal deconvolution, error correction, comparison to reference standards.
